(19) United States
(12) Patent Application Publication
(10) Pub. No.: US 2020/0024610 A1
(43) Pub. Date: Jan. 23, 2020

(54) METHOD FOR SELECTING TARGET SITES FOR SITE-SPECIFIC GENOME MODIFICATION IN PLANTS

(71) Applicant: MONSANTO TECHNOLOGY LLC, St. Louis, MO (US)

(72) Inventors: Brent BROWER-TOLAND, St. Louis, MO (US); Paul S. CHOMET, St. Louis, MO (US); Robert T. GAETA, Chesterfield, MO (US); Andrei Y. KOURANOV, Chesterfield, MO (US); Jonathan C. LAMB, Wildwood, MO (US); Richard J. LAWRENCE, Kirkwood, MO (US); Ruth WAGNER, Chesterfield, MO (US)

(73) Assignee: MONSANTO TECHNOLOGY LLC, St. Louis, MO (US)

(21) Appl. No.: 16/338,335

(22) PCT Filed: Sep. 29, 2017
(86) PCT No.: PCT/US2017/054378

§ 371 Date: Mar. 29, 2019

Related U.S. Application Data
(60) Provisional application No. 62/402,724, filed on Sep. 30, 2016.

(51) Int. Cl. C12N 15/82

(52) U.S. Cl. CPC C12N 15/8213; C12N 15/8261

(57) ABSTRACT

The present disclosure provides methods and compositions for identification of optimal genomic loci in plant genome for site-directed integration in plants.

### CROSS-REFERENCE TO RELATED APPLICATION

[0001] This application claims priority benefit to U.S. Provisional Patent Application No. 62/402,724, filed on Sep. 30, 2016, which is incorporated herein by reference in its entirety.

### FIELD

[0002] The present disclosure provides methods for selecting target sites for site-specific genome modification in plant genomes.

### INCORPORATION OF SEQUENCE LISTING

[0003] A computer readable form of a sequence listing is filed with this application by electronic submission and is incorporated into this application by reference in its entirety. The sequence listing is contained in the file named Sequence_Listing_P34363WO00.txt, which is 1,112,888 bytes in size (measured in operating system MS Windows) and created on Sep. 28, 2017.

### BACKGROUND

[0004] Site-specific genome modification in plant genomes provides a means to develop plants with specific traits and to facilitate plant breeding programs. For the development of new agronomic traits, site-specific genome modification enzymes are used for site-specific genome editing, and for site-specific targeted integration of a DNA of interest. Site-specific transgene integration in a plant genome provides significant improvement over random integration of a transgene in the development of new traits.

[0005] There is a need to develop methods for identification of target sites for site-specific genome modification in a plant genome. The present disclosure describes a target site selection process to identify genomic regions that are suitable as target sites of site-specific genome modification enzymes. The process includes bioinformatics analysis of intron and exon gene structure, non-coding RNA sequence, small RNA sequence, sequence redundancy and chromatin modification consensus sequence sites. Additional information is agronomic data tied to haplotype windows to guide selection of specific target sites for integration of DNA of interest in a given plant. Site-specific integration of DNA of interest will reduce development costs and increase optimal agronomic trait development in the site-specific modified plant genome.

### BRIEF SUMMARY

[0006] Several embodiments relate to a recombinant sequence comprising a non-genic plant genomic sequence and a DNA of interest. In some embodiments, the DNA of interest is integrated into a target site in the non-genic plant genomic sequence. In some embodiments, the target site is located in a haplotype window associated with a neutral to positive impact on one or more agronomic traits. In some embodiments, the target site is further located at genetic distance greater than 1 cM of a haplotype window that is associated with a negative impact on one or more agronomic traits. In some embodiments, the target site is located within a small genomic region (less than 1000 bp) of low genetic diversity, where the low genetic diversity is defined as having from one to ten distinguishable haplotypes across all germplasm in the intended heterotic group, the intended maturity group, or the intended heterotic and maturity group. In some embodiments, the haplotype window is based on physical distance. In some embodiments, the physical distance comprises between 40 base pairs and the full length of the chromosome, with at least 99% sequence similarity across the targeted germplasm and contains two or fewer indels of transposon size (3 kb). In some embodiments, the haplotype window is defined by genetic distance. In some embodiments, the genetic distance is 0.1 cM, 0.5 cM, 1 cM, 2 cM, 3 cM, 4 cM, or 5 cM. In some embodiments, the agronomic trait is one or more selected from the group consisting of: yield, ear relative maturity, ear height, ear number, increased ear size, grain moisture, increased ear dry weight per plant, increased number of kernels per ear, increased weight per kernel, increased number of kernels per plant, decreased ear void, extended grain fill period, test weight, pod number, number of seed per pod, pod position on the plant, number of internodes, incidence of pod shatter, grain size, decreased days from planting to maturity, increased stalk size, increased number of leaves, increased plant height growth rate in vegetative stage, plant architecture, resistance to lodging, percent seed germination, seedling vigor, juvenile traits, efficiency of germination (including germination in stressed conditions), growth rate (including growth rate in stressed conditions), increased number of root branches, increased total root length, efficiency of nodulation and nitrogen fixation, enhanced nitrogen use efficiency, increased water use efficiency as compared to a control plant, efficiency of nutrient assimilation, resistance to biotic and abiotic stress, carbon assimilation, physiology, enhanced disease or pest resistance, or environmental or chemical tolerance, enhanced cold tolerance, nutritional enhancement, enhanced seed protein, enhanced seed starch, enhanced seed oil, plant height, enhanced plant morphology, growth and development, and stay green rating. In some embodiments, the non-genic plant genomic sequence is a corn genomic sequence or a soybean genomic sequence. In some embodiments, the corn genomic sequence is selected from the group consisting of SEQ ID NOs:123-172, 294, 299-551, 555 and 556. In some embodiments, the corn genomic sequence is a B Chromosome sequence selected from the group consisting of SEQ ID NO:300-551. In some embodiments, the soybean genomic sequence is selected from the group consisting of SEQ ID NOs:251-282, 554. In some embodiments, the target site comprises at least 75, at least 80, at least 90, at least 100, at least 200, at least 300, at least 400, at least 500, at least 600, at least 700, at least 800, at least 900, or at least 1000 nucleotides. In some embodiments, the DNA of interest comprises a gene expression cassette comprising a sequence selected from an insecticidal resistance gene, a herbicide tolerance gene, a nitrogen use efficiency gene, a water use efficiency gene, a nutritional quality gene, a DNA binding gene, a selectable marker gene, a target site for a site-specific genome modification enzyme, a recombinase target site, and any combination thereof. In some embodiments, the target site comprises one or more of the criteria selected from the group consisting of: (i) the target site is located greater than 2 kb from a 5′ or a 3′ end of a gene in the plant genome; (ii) the target site is located more than 1 kb from a 5′ or a 3′ end of a repeat region in the plant genome, and wherein the repeat region is at least 2 kb in length; (iii) the target site is located more than 1 kb from a 5′ or a 3′ end of a repressive chromatin mark in the plant genome; (iv) the target site is located more than 200 bases from a small RNA (sRNA) hotspot in the plant genome, and wherein the sRNA hotspot is a sequence from 0.2 to 1 kb in length; (v) the target site is within a region of the plant genome of low DNA methylation; (vi) the target site is not within a region of the plant genome associated with at least one DNA methylation read containing an MspJi motif or a LpnPI motif; or (vii) the target site is within a region of the plant genome that exhibits a total k-mer redundancy score of less than or equal to 30%. In some embodiments, the target site comprises one or more of the criteria selected from the group consisting of: (i) the target site is located greater than 2 kb from a 5′ or a 3′ end of a gene in the plant genome; (ii) the target site is located more than 1 kb from a 5′ or a 3′ end of a repeat region in the plant genome, and wherein the repeat region is at least 2 kb in length; (iii) the target site is located more than 1 kb from a 5′ or a 3′ end of a repressive chromatin mark in the plant genome; (iv) the target site is located more than 200 bases from a small RNA (sRNA) hotspot in the plant genome, and wherein the sRNA hotspot is a sequence from 0.2 to 1 kb in length; (v) the target site is within a 100 bp, 150 bp, 200 bp, 250 bp, 300 bp, 350 bp, 400 bp, 500 bp, 550 bp, 600 bp, 650 bp, 700 bp, 750 bp, 800 bp, 850 bp, 900 bp, 950 bp, or 1,000 bp region of the plant genome of low DNA methylation; (vi) the target site is not within a 100 bp, 150 bp, 200 bp, 250 bp, 300 bp, 350 bp, 400 bp, 500 bp, 550 bp, 600 bp, 650 bp, 700 bp, 750 bp, 800 bp, 850 bp, 900 bp, 950 bp, or 1,000 bp region of the plant genome associated with at least one DNA methylation read containing an MspJi motif or a LpnPI motif; or (vii) the target site is within a 100 bp, 150 bp, 200 bp, 250 bp, 300 bp, 350 bp, 400 bp, 500 bp, 550 bp, 600 bp, 650 bp, 700 bp, 750 bp, 800 bp, 850 bp, 900 bp, 950 bp, or 1,000 bp region of the plant genome that exhibits a total redundancy score of less than or equal to 35%, 34%, 33%, 32%, 31%, 30%, 25%, 20%, 15%, 10% or 5%. In some embodiments, the recombinant nucleic acid is present in a plant, plant cell, or plant part.

[0007] Several embodiments relate to a method of making a transgenic plant cell comprising a DNA of interest targeted to at least one non-genic plant genomic sequence, the method comprising: (i) selecting a target site located within a haplotype window associated with a neutral to positive impact on one or more agronomic traits; (ii) introducing a site-specific genome modification enzyme into a plant cell, wherein the site-specific genome modification enzyme cleaves the target site in the non-genic plant genomic sequence; (iii) introducing a DNA of interest; (iv) targeting the DNA of interest to the target site, wherein the cleavage of the target site facilitates integration of the DNA of interest into the non-genic plant genomic sequence; and (v) selecting transgenic cells comprising the DNA of interest integrated into the non-genic plant genomic sequence. In some embodiments, the method of making a transgenic plant cell comprising a DNA of interest targeted to at least one non-genic plant genomic sequence the method comprising: (i) selecting a target site located within a haplotype window associated with a neutral to positive impact on one or more agronomic traits and where the target site is located at a genetic distance of greater than 10 cM of a haplotype window that is associated with a negative impact on one or more agronomic traits; (ii) introducing a site-specific genome modification enzyme into a plant cell, wherein the site-specific genome modification enzyme cleaves the target site in the non-genic plant genomic sequence; (iii) introducing a DNA of interest; (iv) targeting the DNA of interest to the target site, wherein the cleavage of the target site facilitates integration of the DNA of interest into the non-genic plant genomic sequence; and (v) selecting transgenic cells comprising the DNA of interest integrated into the non-genic plant genomic sequence. In some embodiments, the method of making a transgenic plant cell comprising a DNA of interest targeted to at least one non-genic plant genomic sequence the method comprising: (i) selecting a target site located within a haplotype window associated with a neutral to positive impact on one or more agronomic traits and where the target site is located at a genetic distance of greater than 10 cM of a haplotype window that is associated with a negative impact on one or more agronomic traits; (ii) selecting a haplotype window where the genetic distance is 0.1 cM, 0.5 cM, 1 cM, 2 cM, 3 cM, 4 cM, or 5 cM; (iii) introducing a site-specific genome modification enzyme into a plant cell, wherein the site-specific genome modification enzyme cleaves the target site in the non-genic plant genomic sequence; (iv) introducing a DNA of interest; (v) targeting the DNA of interest to the target site, wherein the cleavage of the target site facilitates integration of the DNA of interest into the non-genic plant genomic sequence; and (vi) selecting transgenic cells comprising the DNA of interest integrated into the non-genic plant genomic sequence. In some embodiments, the agronomic trait is one or more selected from the group consisting of: yield, ear relative maturity, ear height, ear number, increased ear size, grain moisture, increased ear dry weight per plant, increased number of kernels per ear, increased weight per kernel, increased number of kernels per plant, decreased ear void, extended grain fill period, test weight, pod number, number of seed per pod, pod position on the plant, number of internodes, incidence of pod shatter, grain size, decreased days from planting to maturity, increased stalk size, increased number of leaves, increased plant height growth rate in vegetative stage, plant architecture, resistance to lodging, percent seed germination, seedling vigor, juvenile traits, efficiency of germination (including germination in stressed conditions), growth rate (including growth rate in stressed conditions), increased number of root branches, increased total root length, efficiency of nodulation and nitrogen fixation, enhanced nitrogen use efficiency, increased water use efficiency as compared to a control plant, efficiency of nutrient assimilation, resistance to biotic and abiotic stress, carbon assimilation, physiology, enhanced disease or pest resistance, or environmental or chemical tolerance, enhanced cold tolerance, nutritional enhancement, enhanced seed protein, enhanced seed starch, enhanced seed oil, plant height, enhanced plant morphology, growth and development, and stay green rating. In some embodiments, the non-genic plant sequence is a soybean genomic sequence or a corn genomic sequence. In some embodiments, the corn genomic sequence is selected from the group consisting of SEQ ID NOs:123-172, 294, 299-551, 555 and 556. In some embodiments, the corn genomic sequence is a B Chromosome sequence selected from the group consisting of SEQ ID NO:300-551. In some embodiments, the soybean genomic sequence is selected from the group consisting of SEQ ID NOs: 251-282. In some embodiments, the target site comprises one or more of the criteria selected from the group consisting of: (i) the target site is located greater than 2 kb from a 5′ or a 3′ end of a gene in the plant genome; (ii) the target site is located more than 1 kb from a 5′ or a 3′ end of a repeat region in the plant genome, and wherein the repeat region is at least 2 kb in length; (iii) the target site is located more than 1 kb from a 5′ or a 3′ end of a repressive chromatin mark in the plant genome; (iv) the target site is located more than 200 bases from a small RNA (sRNA) hotspot in the plant genome, and wherein the sRNA hotspot is a sequence from 0.2 to 1 kb in length; (v) the target site is within a region of the plant genome of low DNA methylation; (vi) the target site is not within a region of the plant genome associated with at least one DNA methylation read containing an MspJi motif or a LpnPI motif; or (vii) the target site is within a region of the plant genome that exhibits a total k-mer redundancy score of less than or equal to 30%. In some embodiments, the target site comprises one or more of the criteria selected from the group consisting of: (i) the target site is located greater than 2 kb from a 5′ or a 3′ end of a gene in the plant genome; (ii) the target site is located more than 1 kb from a 5′ or a 3′ end of a repeat region in the plant genome, and wherein the repeat region is at least 2 kb in length; (iii) the target site is located more than 1 kb from a 5′ or a 3′ end of a repressive chromatin mark in the plant genome; (iv) the target site is located more than 50 bp, 100 bp, 150 bp, 200 bp, 250 bp, 300 bp, from a small RNA (sRNA) hotspot in the plant genome, and wherein the sRNA hotspot is a sequence from 0.2 to 1 kb in length; (v) the target site is within a 50 bp, 100 bp, 150 bp, 200 bp, 250 bp, 300 bp, 350 bp, 400 bp, 500 bp, 550 bp, 600 bp, 650 bp, 700 bp, 750 bp, 800 bp, 850 bp, 900 bp, 950 bp, or 1,000 bp region of the plant genome of low DNA methylation; (vi) the target site is not within a 100 bp, 150 bp, 200 bp, 250 bp, 300 bp, 350 bp, 400 bp, 500 bp, 550 bp, 600 bp, 650 bp, 700 bp, 750 bp, 800 bp, 850 bp, 900 bp, 950 bp, or 1,000 bp region of the plant genome associated with at least one DNA methylation read containing an MspJi motif or a LpnPI motif; or (vii) the target site is within a 100 bp, 150 bp, 200 bp, 250 bp, 300 bp, 350 bp, 400 bp, 500 bp, 550 bp, 600 bp, 650 bp, 700 bp, 750 bp, 800 bp, 850 bp, 900 bp, 950 bp, or 1,000 bp region of the plant genome that exhibits a redundancy score of less than or equal to 35%, 34%, 33%, 32%, 31%, 30%, 25%, 20%, 15%, 10% or 5%. In some embodiments, the target site comprises at least 75, at least 80, at least 90, at least 100, at least 200, at least 300, at least 400, at least 500, at least 600, at least 700, at least 800, at least 900, at least 1000 nucleotides. In some embodiments, the DNA of interest comprises a gene expression cassette comprising a sequence selected from an insecticidal resistance gene, a herbicide tolerance gene, a nitrogen use efficiency gene, a water use efficiency gene, a nutritional quality gene, a DNA binding gene, a selectable marker gene, and any combination thereof. In some embodiments, the site-specific genome modification enzyme is selected from an endonuclease, a recombinase, a transposase, and any combination thereof. In some embodiments, the endonuclease is selected from a meganuclease, a zinc finger nuclease, a transcription activator-like effector nuclease (TALEN), a Cas9 nuclease, a Cpf1 nuclease, a Cas12a nuclease, a Cas12e nuclease, a CasX nuclease, a Cas12d nuclease, a CasY nuclease, a Cas12b nuclease, a C2C1 nuclease, a Cas12c nuclease, a C2C3 nuclease, a C2C4 nuclease, a C2C5 nuclease, a C2C6 nuclease, a C2C7 nuclease, a C2C8 nuclease, a C2C9 nuclease, a C2C10 nuclease, a Cas13a nuclease, a Cas13b nuclease, and a Cas13c nuclease. In some embodiments, the recombinase is a tyrosine recombinase attached to a DNA recognition motif, or a serine recombinase attached to a DNA recognition motif. In some embodiments, the tyrosine recombinase attached to a DNA recognition motif is selected from the group consisting of a Cre recombinase, a Flp recombinase, and a Tnp1 recombinase. In some embodiments, the serine recombinase attached to a DNA recognition motif is selected from the group consisting of a PhiC31 integrase, an R4 integrase, and a TP-901 integrase. In some embodiments, the transposase is a DNA transposase attached to a DNA binding domain. In some embodiments, transcription activator-like effector nuclease (TALEN) DNA binding site within the target site of corn genomic sequence is selected from the SEQ ID NOs presented in Table 1. In some embodiments, the transcription activator-like effector nuclease (TALEN) DNA binding site within the target site of soybean genomic sequence is selected from the SEQ ID NOs presented in Table 2. In some embodiments, the DNA of interest is an exogenous sequence. In some embodiments, the DNA of interest comprises one or more transgenes. In some embodiments, the DNA of interest is integrated into the target site via a non-homologous end joining. In some embodiments, the DNA of interest is integrated into the target site via a homologous recombination. In some embodiments, the recombinant nucleic acid is present in a plant, plant cell, or plant part.

### BRIEF DESCRIPTION OF THE DRAWINGS

[0008] FIG. 1 is a general work flow diagram illustrating one embodiment of steps in the method of site selection for targeted integration.

[0009] FIG. 2 illustrates a screen shot sample of a Genome Browser output for a 10 kb region of chromosome 1 (CR01) of the corn B73 reference genome from position 287440 kb to 287449 kb. Relative redundancy scores (horizontal line marked “Zm.B73 Redundancy score”) are illustrated by vertical bars, with the region between 278446 kb and 287449 kb having high redundancy. An exon for the endogenous gene GRMZM2G138382 is illustrated by a gray horizontal bar from 287440 kb to approximately 287442 kb. The horizontal arrow labeled “2 kb” shows the distance to the 5′-end of SEQ ID NO:299. MspJI methylation consensus sites are illustrated by vertical bars on the horizontal line labeled “Methylation by MspJI”. Repeat regions are indicated by horizontal black bars with several positioned between 287287444.5 kb-287449 kb. The horizontal arrow labeled “1 kb” shows the distance to the 3′-end of SEQ ID NO:299. H3K27me3 methylation consensus sequence region is indicated by vertical bars on the horizontal line labeled “H3K27me3 peak”, with a double peak region positioned at 287441.3 kb to 287442.3 kb. The position of SEQ ID NO: 130 is illustrated by the horizontal line at the top and is positioned approximately from 287442.7 kb to 287445.9 kb. SEQ ID NO:130 is a sequence region about 3.4 kb in length representing at least 4 specific TALEN target sites. A region encompassing a TALEN specific target site, represented by SEQ ID: 294, is within the region represented by SEQ ID NO:130 and SEQ ID NO:299. The position of SEQ ID NO: 299 is illustrated by the horizontal line at the top and is positioned approximately from 287444 kb to 287445.9 kb. The position of SEQ ID NO: 294 is illustrated by the horizontal line at the bottom and is positioned approximately from 287444 kb to 287445.9 kb. The vertical thick arrow on the horizontal line representing MspJI sites illustrates the position of the TALEN binding sites (SEQ ID NO:35 and SEQ ID NO:94) for the TALEN target site represented by SEQ ID NO:294.

[0010] FIG. 3 illustrates an enlarged region of chromosome 1 (CR01) of the corn B73 reference genome from FIG. 2 corresponding to the region of nucleotide 287442700 kb to 287226211 kb. Additionally, the MspJI DNA methylation profile calculated for this region is plotted as vertical bars, with relative counts of 0 to 6 (Y-axis). The nucleotide region of each of SEQ ID NO:130, SEQ ID NO:299, and SEQ ID NO:294 are indicated by the horizontal double-arrow lines. The nucleotide position selected for TALEN binding sites (SEQ ID NO:35 and SEQ ID NO:94) and TALEN induced double-strand break (DSB) is illustrated by the thick, black horizontal line.

[0011] FIG. 4 provides a graph comparing the percent integration of donor polynucleotides into seven sites on the corn genome LH244. Histograms show the percent integration of nucleotides into the corn genome at seven sites, SEQ ID NOs: 32/91, 33/92, 34/93, 35/94, 295/296, 297/298, and 304/305 along with the percent integration for the negative controls corresponding to each site. Error bars represent Standard Deviation. Double asterisks (**) identify sites with significantly different (p>0.05) integration frequencies than their negative controls. The panel below indicates DNA methylation status of each targeted region in the genome where “+” indicates methylated and “−” indicates non-methylated regions. The methylated regions were identified by genome-wide MspJI/LpnPI sequencing as described in this application.

[0012] FIG. 5 illustrates a 9.6 kb region of chromosome 2 (CR02) of the soy Williams 82 reference genome from position 49329900 kb to 49339882 kb. This region is represented by SEQ ID NO:257. The Y-axis shows both the redundancy scores (k-mer) and the MspJI methylation profile along the length of the sequence (X-axis). The box at position 493353399 kb to 493363399 kb is expanded in FIG. 6, and is the region of TALEN target site selection.

[0013] FIG. 6 illustrates a 1 kb nucleotide region (SEQ ID NO:554) of the graph from FIG. 5, from position 49335399 kb to 49336386 kb. At the expanded scale, a region of relative low redundancy score and a relatively low methylation profile is identified as a region for site-specific genome modification (horizontal bar).

### DETAILED DESCRIPTION

[0014] Unless defined otherwise, all technical and scientific terms used have the same meaning as commonly understood by one of ordinary skill in the art to which this disclosure belongs. Where a term is provided in the singular, the inventors also contemplate aspects of the disclosure described by the plural of that term. Where there are discrepancies in terms and definitions used in references that are incorporated by reference, the terms used in this application shall have the definitions given herein. Other technical terms used have their ordinary meaning in the art in which they are used, as exemplified by various art-specific dictionaries, for example, “The American Heritage® Science Dictionary” (Editors of the American Heritage Dictionaries, 2011, Houghton Mifflin Harcourt, Boston and New York), the “McGraw-Hill Dictionary of Scientific and Technical Terms” (6th edition, 2002, McGraw-Hill, New York), or the “Oxford Dictionary of Biology” (6th edition, 2008, Oxford University Press, Oxford and New York). The inventors do not intend to be limited to a mechanism or mode of action. Reference thereto is provided for illustrative purposes only.

[0015] The practice of the present disclosure employs, unless otherwise indicated, conventional techniques of biochemistry, chemistry, molecular biology, microbiology, cell biology, genomics, plant breeding, and biotechnology, which are within the skill of the art. See Green and Sambrook, MOLECULAR CLONING: A LABORATORY MANUAL, 4th edition (2012); CURRENT PROTOCOLS IN MOLECULAR BIOLOGY (F. M. Ausubel, et al. eds., (1987)); the series METHODS IN ENZYMOLOGY (Academic Press, Inc.): PCR 2: A PRACTICAL APPROACH (M. J. MacPherson, B. D. Hames and G. R. Taylor eds. (1995)); Harlow and Lane, eds. (1988) ANTIBODIES, A LABORATORY MANUAL; ANIMAL CELL CULTURE (R. I. Freshney, ed. (1987)); RECOMBINANT PROTEIN PURIFICATION: PRINCIPLES AND METHODS, 18-1142-75, GE Healthcare Life Sciences; C. N. Stewart, A. Touraev, V. Citovsky, T. Tzfira eds. (2011) Plant Transformation Technologies (Wiley-Blackwell); and R. H. Smith (2013) PLANT TISSUE CULTURE. TECHNIQUES AND EXPERIMENTS (Academic Press, Inc.).

[0016] Any references cited herein are incorporated by reference in their entireties.

[0017] As used herein, the singular form “a,” “an,” and “the” include plural references unless the context clearly dictates otherwise. Thus, for example, reference to “plant,” “the plant,” or “a plant” also includes a plurality of plants; also, depending on the context, use of the term “plant” can also include genetically similar or identical progeny of that plant; use of the term “a nucleic acid” optionally includes, as a practical matter, many copies of that nucleic acid molecule; similarly, the term “probe” optionally (and typically) encompasses many similar or identical probe molecules.

[0018] As used herein, the term “about” indicates that a value includes the inherent variation of error for the method being employed to determine a value, or the variation that exists among experiments.

[0019] As used herein, the term “plant” includes a whole plant and any progeny, cell, tissue, or part of a plant. A progeny plant can be from any filial generation, e.g., F₁, F₂, F₃, F₄, F₅, F₆, F₇, etc. The term “plant parts” include any part(s) of a plant, including, for example and without limitation: seed (including mature seed and immature seed); a plant cutting; a plant cell; a plant cell culture; a plant protoplast; a plant organ (e.g., pollen, embryos, flowers, fruits, shoots, leaves, roots, stems, and explants). A plant tissue or plant organ may be a seed, callus, or any other group of plant cells that is organized into a structural or functional unit. A plant cell or tissue culture may be capable of regenerating a plant having the physiological and morphological characteristics of the plant from which the cell or tissue was obtained, and of regenerating a plant having substantially the same genotype as the donor plant. In contrast, some plant cells are not capable of being regenerated to produce plants. Regenerable cells in a plant cell or tissue culture may be embryos, protoplasts, meristematic cells, callus, pollen, leaves, anthers, roots, root tips, silk, flowers, kernels, ears, cobs, husks, or stalks.

[0020] Plant parts include harvestable parts and parts useful for propagation of progeny plants. Plant parts useful for propagation include, for example and without limitation: seed; fruit; a cutting; a seedling; a tuber; and a rootstock. A harvestable part of a plant may be any useful part of a plant, including, for example and without limitation: flower; pollen; seedling; tuber; leaf; stem; fruit; seed; and root.

[0021] A plant cell is the structural and physiological unit of the plant. Plant cells, as used herein, includes protoplasts and protoplasts with a cell wall. A plant cell may be in the form of an isolated single cell, or an aggregate of cells (e.g., a friable callus and a cultured cell), and may be part of a higher organized unit (e.g., a plant tissue, plant organ, and plant). Thus, a plant cell may be a protoplast, a gamete producing cell, or a cell or collection of cells that can regenerate into a whole plant.

[0022] As used herein, the term “plant genome” refers to a nuclear genome, a mitochondrial genome, or a plastid (e.g., chloroplast) genome of a plant cell.

[0023] As used herein, the term “corn” refers to Zea mays or maize and includes all plant varieties that can be bred with corn, including wild maize species.

[0024] As used herein, the term “soybean” refers to Glycine max and includes all plant varieties that can be bred with soybean, including wild soybean species.

[0025] As used herein, the term “haplotype” refers to a chromosomal region within a haplotype window defined by at least one polymorphic marker. The unique marker fingerprint combinations in each haplotype window define individual haplotypes for that window. Further, changes in a haplotype, brought about by recombination for example, may result in the modification of a haplotype so that it comprises only a portion of the original (parental) haplotype operably linked to the trait, for example, via physical linkage to a gene, QTL, or transgene. Any such change in a haplotype would be included in our definition of what constitutes a haplotype so long as the functional integrity of that genomic region is unchanged or improved.

[0026] As used herein, the term “haplotype window” refers to a chromosomal region that is established by statistical analyses known to those of skill in the art and is in linkage disequilibrium. Thus, identity by state between two inbred individuals (or two gametes) at one or more marker loci located within this region is taken as evidence of identity-by-descent of the entire region. Each haplotype window includes at least one polymorphic marker. Haplotype windows are mapped along each chromosome in the genome.

[0027] As used herein, the term “polymorphic marker” refers to a polymorphic nucleic acid sequence or nucleic acid feature. A “polymorphism” is a variation among individuals in sequence, particularly in DNA sequence, or feature, such as a transcriptional profile or methylation pattern. Useful polymorphisms include single nucleotide polymorphisms (SNPs), insertions or deletions in DNA sequence (Indels), simple sequence repeats of DNA sequence (SSRs) a restriction fragment length polymorphism, a haplotype, and a tag SNP. A genetic marker, a gene, a DNA-derived sequence, a RNA-derived sequence, a promoter, a 5′ untranslated region of a gene, a 3′ untranslated region of a gene, microRNA, siRNA, a QTL, a satellite marker, a transgene, mRNA, ds mRNA, a transcriptional profile, and a methylation pattern may comprise polymorphisms. A polymorphism may arise from random processes in nucleic acid replication, through mutagenesis, as a result of mobile genomic elements, from copy number variation and during the process of meiosis, such as unequal crossing over, genome duplication and chromosome breaks and fusions. The variation can be commonly found or may exist at low frequency within a population, the former having greater utility in general plant breeding and the latter may be associated with rare but important phenotypic variation.

[0028] In one aspect, a “polymorphic marker” can be a detectable characteristic that can be used to discriminate between heritable differences between organisms. Examples of such characteristics may include genetic markers, protein composition, protein levels, oil composition, oil levels, carbohydrate composition, carbohydrate levels, fatty acid composition, fatty acid levels, amino acid composition, amino acid levels, biopolymers, pharmaceuticals, starch composition, starch levels, fermentable starch, fermentation yield, fermentation efficiency, energy yield, secondary compounds, metabolites, morphological characteristics, and agronomic characteristics.

[0029] As used herein, the term “polynucleotide” refers to a nucleic acid molecule containing multiple nucleotides and generally comprises at least 2, at least 5, at least 10, at least 20, at least 30, at least 40, at least 50, at least 100, at least 250, at least 500, at least 1000, at least 1500, at least 2000, at least 2500, at least 3000, at least 5000, or at least 10,000 nucleotide bases. As an example, a polynucleotide provided herein can be a plasmid. A specific polynucleotide of 18-25 nucleotides in length may be referred to as an “oligonucleotide”. Nucleic acid molecules provided herein include deoxyribonucleic acids (DNA) and ribonucleic acids (RNA) and functional analogues thereof, such as complementary DNA (cDNA). Nucleic acid molecules provided herein can be single stranded or double stranded. Nucleic acid molecules comprise the nucleotide bases adenine (A), guanine (G), thymine (T), cytosine (C). Uracil (U) replaces thymine in RNA molecules.

[0030] The symbol “N” can be used to represent any nucleotide base (e.g., A, G, C, T, or U). The symbol “K” can be used to represent a G or a T/U nucleotide base.

[0031] As used herein, the term “genic region” or “genic sequence” refers to a polynucleotide sequence that comprises an open reading frame encoding at least one RNA and/or polypeptide. The genic region may also encompass any identifiable adjacent 5′ and 3′ non-coding nucleotide sequences involved in the regulation of expression of the open reading frame up to about 2 Kb upstream of the coding region and 1 Kb downstream of the coding region, but possibly further upstream or downstream. A genic region further includes any introns that may be present in the genic region. Further, the genic region may comprise a single gene sequence, or multiple gene sequences interspersed with short spans (less than 1 Kb) of non-genic sequences.

[0032] As used herein, the term “non-genic plant genomic sequence” or “non-genic plant sequence” or “intergenic sequence” or “intergenic region” refers to a native DNA sequence found in the genome of a plant, devoid of any open reading frames, gene sequences, or gene regulatory sequences. Furthermore, the non-genic sequence does not comprise any intron sequence (specifically, introns are excluded from the definition of non-genic). The non-genic sequence cannot be transcribed or translated into protein.

[0033] As used herein, the term “recombination” refers to the exchange of nucleotides between two nucleic acid molecules. The term “homologous recombination” (HR) refers to the exchange of nucleotides at a conserved region shared by two nucleic acid molecules. Homologous recombination HR includes symmetric homologous recombination and asymmetric homologous recombination. Asymmetric homologous recombination can also mean unequal recombination. As used herein, “non-homologous end joining” (NHEJ) refers to the ligation of two ends of double-stranded DNA without the need of a homologous sequence to direct the ligation. Methods for detecting recombination include, but are not limited to, 1) phenotypic screening, 2) molecular marker technologies such as single nucleotide polymorphism—SNP analysis by TaqMan® or Illumina/Infinium technology, 3) Southern blot, 4) PCR, and 4) sequencing.

[0034] As used herein, the terms “targeted insertion” and “targeted integration” are used interchangeably.

[0035] As used herein, the term “donor sequence” “donor DNA” or “DNA of interest” refers to a nucleic acid/DNA sequence that has been selected for targeted insertion into a host sequence. In one aspect, the host sequence is a plant genomic sequence. A donor sequence can be of any length, for example between 2 and 50,000 nucleotides in length (or any integer value therebetween). In some embodiments, a donor sequence is between about 1,000 and 5,000 nucleotides in length (or any integer value therebetween). In some embodiments, a donor sequence is between about 5,000 and 10,000 nucleotides in length (or any integer value therebetween). In some embodiments, a donor sequence is between about 10,000 and 15,000 nucleotides in length (or any integer value therebetween). In some embodiments, a donor sequence is between about 15,000 and 20,000 nucleotides in length (or any integer value therebetween). In some embodiments, a donor sequence is between about 20,000 and 25,000 nucleotides in length (or any integer value therebetween). In some embodiments, a donor sequence is between about 25,000 and 30,000 nucleotides in length (or any integer value therebetween). In some embodiments, a donor sequence is between about 30,000 and 35,000 nucleotides in length (or any integer value therebetween). In some embodiments, a donor sequence is between about 35,000 and 40,000 nucleotides in length (or any integer value therebetween). In some embodiments, a donor sequence is between about 40,000 and 45,000 nucleotides in length (or any integer value therebetween). In some embodiments, a donor sequence is between about 45,000 and 50,000 nucleotides in length (or any integer value therebetween). A donor sequence may comprise one or more gene expression cassettes that further comprise actively transcribed and/or translated gene sequences. Conversely, the donor sequence may comprise a polynucleotide sequence which does not comprise a functional gene expression cassette or an entire gene (e.g., may simply comprise regulatory sequences such as a promoter), or may not contain any identifiable gene expression elements or any actively transcribed gene sequence. Further, the donor sequence can be DNA or RNA, can be linear or circular, and can be single-stranded or double-stranded. It can be delivered to the cell as naked nucleic acid, as a complex with one or more delivery agents (e.g., liposomes, poloxamers, T-strand encapsulated with proteins, etc.,) or contained in a bacterial or viral delivery vehicle, such as, for example, Agrobacterium tumefaciens or an adenovirus or a Gemini Virus, or a nanovirus, respectively.

[0036] As used herein, the term “host sequence” or “host polynucleotide” refers to a polynucleotide sequence in a host plant genome. The term “target site,” as used herein, refers to a polynucleotide sequence that is sufficiently unique in a plant genome to allow targeted genome modification by a site-specific genome modification enzyme. In one aspect, the sequence of the target site is changed from the wild-type sequence, namely the target site is edited. In another aspect, the target site is the site of insertion of a DNA of interest into one specific sequence. In one aspect, the target site is located within a small genomic region (e.g., less than 1500 bp, less than 1000 bp, less than 900 bp, less than 950 bp, less than 850 bp, less than 800 bp, less than 750 bp, less than 700 bp, less than 650 bp, less than 600 bp, less than 550 bp, less than 500 bp, less than 450 bp, less than 400 bp, less than 350 bp, less than 300 bp, less than 250 bp, less than 200 bp, less than 150 bp, less than 100 bp) of low genetic diversity. The term “low genetic diversity” is defined as having from one to ten distinguishable haplotypes across all germplasm in the intended heterotic group, the intended maturity group, or the intended heterotic and maturity group. In some embodiments, the small genomic region comprises 1, 2, 3, 4, 5, 6, 7, 8, 9 or 10 distinguishable haplotypes across all germplasm in the intended heterotic group, the intended maturity group, or the intended heterotic and maturity group.

[0037] As used herein, the term “heterotic group” refers to a collection of germplasm which, when crossed to germplasm external to its group (usually another heterotic group), tends to exhibit a higher degree of heterosis (on average) then when crossed to a member of its own group. Two reciprocal heterotic groups define a heterotic pattern. Identification of potential heterotic patterns may be conducted using a population diallele evaluation. The concept of heterotic groups was first developed by maize researchers who observed that inbred lines selected out of certain populations tended to produce superior performing hybrids when hybridized with inbreds from other groups. A heterotic group may also refer to a group of related or unrelated genotypes from the same or different populations, which display similar combining ability when crossed with genotypes from other germplasm groups.

[0038] Knowledge of the heterotic groups and patterns is helpful in plant breeding. It helps the breeders to utilize their germplasm in a more efficient and consistent manner through exploitation of complementary lines for maximizing the outcome of a hybrid breeding program.

[0039] As used herein, the term “maturity group” refers to a classification of some crop varieties based on their growth and development. For example, a soybean with maturity group O or OO only needs a short growing season before harvest; whereas, a soybean with maturity group V and VI needs a longer growing season before the plant is completely developed and ready for harvest. Maturity groups are also described in the context of their indeterminate/determinate growth habit. In corn, relative maturity (RM) group ratings are related to the duration of the growing season, which is related to the growing degree units (GDUs) required by the plant for flowering and reaching physiological maturity. In corn RM groups are listed as early-RM, mid-RM, and late-RM.

[0040] As used herein, the term “gene expression cassette” refers to a polynucleotide sequence comprising at least a first polynucleotide sequence capable of initiating transcription of an operably linked second polynucleotide sequence and optionally a transcription termination sequence operably linked to the second polynucleotide sequence. In some aspects, the gene expression cassette may comprise a flanking left homology arm, a right homology arm, or both a left homology arm and a right homology arm.

[0041] In some aspects, a sequence of interest provided herein comprises 0, at least 1, at least 2, at least 3, at least 4, at least 5, at least 6, at least 7, at least 8, at least 9, or at least 10 expression cassettes. In some aspects, the sequence of interest provided herein comprises one or more expression cassettes physically and/or operably linked in a cassette stack. In some aspects a sequence of interest comprises an expression cassette adjacent to a left homology arm DNA sequence, a right homology arm DNA sequence, or a left homology arm DNA sequence and a right homology arm DNA sequence. In some aspects, a sequence of interest comprises an expression cassette flanked by homology arm DNA sequences. In some aspects, a sequence of interest comprises an expression cassette that is not flanked by homology arms. In another aspect, a sequence of interest provided herein comprises an endogenous polynucleotide sequence. In some embodiments, the endogenous polynucleotide sequence comprises an intergenic sequence, a native gene, or a mutated gene. In another aspect, a sequence of interest provided herein comprises an exogenous polynucleotide sequence.

[0042] In an aspect, a sequence of interest provided herein comprises 0, at least 1, or at least 2 homology arm DNA sequences. When a sequence of interest provided herein comprises at least two homology arm DNA sequences the at least two homology arm DNA sequences can be distinguished by referring to them as a “left homology arm DNA sequence” and a “right homology arm DNA sequence.” In an aspect, a sequence of interest provided herein comprises both a left homology arm DNA sequence and a right homology arm DNA sequence. In an aspect, a right homology arm DNA sequence and a left homology arm DNA sequence provided herein are homologous to a targeted genomic DNA sequence in the plant or plant cell. In an aspect, a right homology arm DNA sequence and a left homology arm DNA sequence are not essentially homologous to each other. In another aspect, a right homology arm DNA sequence and a left homology arm DNA sequence are essentially homologous to each other. In an aspect, a sequence of interest comprises one or more expression cassettes positioned between a right homology arm DNA sequence and a left homology arm DNA sequence. In an aspect, a sequence of interest comprises a sequence for templated genome editing positioned between a right homology arm DNA sequence and a left homology arm DNA sequence. In yet another aspect, at least part of a sequence of interest provided herein is outside of the region comprising a left homology arm DNA sequence, a right homology arm DNA sequence, and one or more cassettes. In another aspect, at least part of a sequence of interest provided herein is within the region comprising a left homology arm DNA sequence, a right homology arm DNA sequence, and a sequence for templated genome editing.

[0043] As used herein, the term “homology arm” or “homology arm DNA sequence” refers to a polynucleotide sequence that has at least 80%, at least 85%, at least 90%, at least 91%, at least 92%, at least 93%, at least 94%, at least 95%, at least 96%, at least 97%, at least 98%, at least 99% or 100% sequence identity to a target sequence in a plant or plant cell. A homology arm can comprise at least 5, at least 10, at least 15, at least 20, at least 25, at least 30, at least 35, at least 40, at least 45, at least 50, at least 55, at least 60, at least 65, at least 70, at least 75, at least 80, at least 85, at least 90, at least 95, at least 100, at least 150, at least 200, at least 250, at least 300, at least 400, at least 500, at least 600, at least 700, at least 800, at least 900, at least 1000, or at least 2500 nucleotides.

[0044] In one aspect, the target sequence comprises a protein-coding sequence. In one aspect, the target sequence is a genic sequence. As used herein, a “genic” sequence is a nucleic acid sequence that encodes a protein or a non-protein-coding RNA. A genic sequence can include one or more introns. In another aspect, the target sequence is a non-genic sequence. As used herein, a “non-genic” sequence is a nucleic acid sequence that is not a genic sequence. In another aspect, the target sequence comprises a non-coding sequence. In yet another aspect, the target sequence comprises both a protein-coding sequence and a non-coding sequence. In another aspect, the target sequence does not comprise a gene or a portion of a gene. In some embodiments, the target sequence is linked to a gene of interest. In some embodiments, the target sequence is linked to a transgene integrated in the genome of a plant or plant cell.

[0045] In one embodiment, the optimal target site is positioned 2 kb from either the 5′ or the 3′ end of a gene, and the 2 kb genomic region between the target site and the end of the gene is as a region for homologous recombination. As such, the 2 kb sequence is used to engineer homology arms flanking the DNA of interest to be integrated at the target site.

[0046] In one embodiment, a target site is selected that is in a region that is greater than 200 nucleotides of a sRNA hotspot.

[0047] In one embodiment, a target site is selected that is in a region ≤200 nucleotides of a sRNA hotspot. In some embodiments, a target site is selected for integration of a transgene cassette by homologous recombination, wherein the homology arms flanking the transgene cassette are designed such that the transgene cassette integrates at the target site in a ‘head-to-head’ orientation with the sRNA hotspot. This ‘head-to-head’ orientation is where the direction of transcription of the transgene cassette is in the opposite orientation of the direction of transcription of the sRNA hotspot within the genome. This head-to-head orientation will reduce the chance of incorporation of sRNA binding sites during transcription of mRNA from the transgene cassette.

[0048] In another embodiment, a target site is selected that is in a region (≤200 nucleotides) of a sRNA hotspot. If the target site is selected for integration of a transgene cassette by homologous recombination, then the homology arms flanking the transgene cassette are designed to have homology to a genomic within the sRNA hotspot, or flanking on the distal 5′-end (for a 5′ homology arm) or the distal 3′-end (for a 3′ homology arm) of the sRNA hotspot. Thereby, and during the HR-dependent integration of the transgene cassette the process of homologous recombination effectively truncates and/or deletes the sRNA hotspot from the final transgenic genomic locus.

[0049] As used herein, the term “endogenous sequence” refers to the native form of a polynucleotide, gene, or polypeptide in its natural location in the organism or in the genome of an organism.

[0050] As used herein, the term “exogenous sequence” refers to any nucleic acid sequence that has been removed from its native location and inserted into a new location altering the sequences that flank the nucleic acid sequence that has been moved. For example, an exogenous DNA sequence may comprise a sequence from another species, a process referred to as transgenesis. Alternatively, an exogenous DNA sequence may comprise a sequence from the same, or related species, a process referred to as cisgenesis.

[0051] As used herein, the term “site-specific genome modification enzyme” refers to any enzyme that can cleave a nucleotide sequence in a site-specific manner. In the present disclosure, site-specific genome modification enzymes include endonucleases, recombinases, transposases, helicases, and any combination thereof. In some embodiments, the site-specific genome modification enzyme is selected from a meganuclease, a zinc finger nuclease, a transcription activator-like effector nuclease (TALEN), a Cas9 nuclease, a Cpf1 nuclease, a Cas12a nuclease, a Cas12e nuclease, a CasX nuclease, a Cas12d nuclease, a CasY nuclease, a Cas12b nuclease, a C2C1 nuclease, a Cas12c nuclease, a C2C3 nuclease, a C2C4 nuclease, a C2C5 nuclease, a C2C6 nuclease, a C2C7 nuclease, a C2C8 nuclease, a C2C9 nuclease, a C2C10 nuclease, a Cas13a nuclease, a Cas13b nuclease, and a Cas13c nuclease.

[0052] As used herein, the terms “homology” and “identity” when used in relation to nucleic acids, describe the degree of similarity between two or more nucleotide sequences. The percentage of “sequence identity” between two sequences is determined by comparing two optimally aligned sequences over a comparison window, such that the portion of the sequence in the comparison window may comprise additions or deletions (gaps) as compared to the reference sequence (which does not comprise additions or deletions) for optimal alignment of the two sequences. The percentage is calculated by determining the number of positions at which the identical nucleic acid base or amino acid residue occurs in both sequences to yield the number of matched positions, dividing the number of matched positions by the total number of positions in the window of comparison, and multiplying the result by 100 to yield the percentage of sequence identity. A sequence that is identical at every position in comparison to a reference sequence is said to be identical to the reference sequence and vice-versa. An alignment of two or more sequences may be performed using any suitable computer program. For example, a widely used and accepted computer program for performing sequence alignments is CLUSTALW v1.6 (Thompson, et al. (1994) Nucl. Acids Res., 22: 4673-4680).

### Methods and Compositions for Site-directed Integration in Plants

[0053] The present disclosure provides a recombinant sequence comprising a non-genic plant genomic sequence and a DNA of interest, wherein the DNA of interest is inserted into a target site in the non-genic plant genomic sequence, and wherein the target site is located in a haplotype window associated with a neutral to positive impact on one or more agronomic traits, and wherein the target site is further located at genetic distance greater than 1 cM of a haplotype window that is associated with a negative impact on one or more agronomic traits.

[0054] The present disclosure also provides a method of making a transgenic plant cell comprising a donor sequence targeted to at least one non-genic plant genomic sequence, the method comprising: (a) selecting a target site located within a haplotype window associated with a neutral to positive impact on one or more agronomic traits; (b) introducing a site-specific genome modification enzyme into a plant cell, wherein the site-specific genome modification enzyme cleaves the target site in the non-genic plant genomic sequence; (c) introducing a donor sequence; (d) targeting the donor sequence to the target site, wherein the cleavage of the target site facilitates integration of the donor sequence into the non-genic plant genomic sequence; and (e) selecting transgenic cells comprising the donor sequence integrated into the non-genic plant genomic sequence.

[0055] As used herein, an agronomic trait is a measure of crop performance. Non-limiting examples of agronomic traits, from seeding to harvest, include: yield, ear relative maturity, ear height, ear number, increased ear size, grain moisture, increased ear dry weight per plant, increased number of kernels per ear, increased weight per kernel, increased number of kernels per plant, decreased ear void, extended grain fill period, test weight, pod number, number of seed per pod, pod position on the plant, number of internodes, incidence of pod shatter, grain size, decreased days from planting to maturity, increased stalk size, increased number of leaves, increased plant height growth rate in vegetative stage, plant architecture, resistance to lodging, percent seed germination, seedling vigor, juvenile traits, efficiency of germination (including germination in stressed conditions), growth rate (including growth rate in stressed conditions), increased number of root branches, increased total root length, efficiency of nodulation and nitrogen fixation, enhanced nitrogen use efficiency, increased water use efficiency as compared to a control plant, efficiency of nutrient assimilation, resistance to biotic and abiotic stress, carbon assimilation, physiology, enhanced disease or pest resistance, or environmental or chemical tolerance, enhanced cold tolerance, nutritional enhancement, enhanced seed protein, enhanced seed starch, enhanced seed oil, plant height, enhanced plant morphology, growth and development, and stay green rating.

[0056] In some embodiments, the non-genic plant sequence is a soybean genomic sequence or a corn genomic sequence. In some embodiments, the corn genomic sequence is selected from the group consisting of SEQ ID NOs:123-172, 294, 299-551, 555, and 556. In other embodiments, the soybean genomic sequence is selected from the group consisting of SEQ ID NOs:251-282, 554.

[0057] In some embodiments, the target site is located within a small genomic region (e.g., less than 500 bp, less than 1000 bp, less than 2000 bp) of low genetic diversity, where low genetic diversity is defined as having between one, two, three, four, five, six, seven, eight, nine and ten distinguishable haplotypes across all germplasm in an intended heterotic group, an intended maturity group, or an intended heterotic and maturity group.

[0058] In some embodiments, the target site comprises at least 75, at least 80, at least 80, at least 100, at least 200, at least 300, at least 400, at least 500, at least 600, at least 700, at least 800, at least 900, or at least 1000 nucleotides. In some embodiments, the target site comprises about 100, about 150, about 200, about 250, about 300, about 350, about 400, about 450, about 500, about 550, about 600, about 650, about 700, about 750, about 800, about 850, about 900, about 950, about 1000, about 1100, about 1200, about 1300, about 1400, about 1500, about 1600, about 1700, about 1800, about 1900, or about 2000 nucleotides.

[0059] In one aspect, the haploid window is defined by genetic distance. In some embodiments, the genetic distance is from about 0.1 cM to about 5 cM. In some embodiments, the genetic distance is about 0.1 cM, about 0.2 cM, about 0.3 cM, about 0.4 cM, about 0.5 cM, about 0.6 cM, about 0.7 cM, about 0.8 cM, about 0.9 cM, about 1 cM, about 1.5 cM, about 2 cM, about 2.5 cM, about 3 cM, about 3.5 cM, about 4 cM, about 4.5 cM, or about 5 cM.

[0060] In some embodiments, the haplotype window is based on physical distance of the haplotype window which is from about 40 base pairs to the full length of the chromosome, with at least 99% sequence similarity across germplasm and contains two or fewer indels of −3 kb.

[0061] In some embodiments, the target site is further located at a genetic distance of greater than 1 cM, greater than 2 cM, greater than 3 cM, greater than 4 cM, greater than 5 cM, greater than 6 cM, greater than 7 cM, greater than 8 cM, greater than 9 cM, or greater than 10 cM of a haplotype window that is associated with a negative impact on one or more agronomic traits.

[0062] In some embodiments, the target site comprises one or more of the criteria selected from the group consisting of: the target site is located greater than 2 kb from a 5′ or a 3′ end of a gene in the plant genome; the target site is located more than 1 kb from a 5′ or a 3′ end of a repeat region in the plant genome, and wherein the repeat region is at least 2 kb in length; the target site is located more than 1 kb from a 5′ or a 3′ end of a repressive chromatin mark in the plant genome; the target site is located more than 200 bases from a small RNA (sRNA) hotspot in the plant genome, and wherein the sRNA hotspot is a sequence from 0.2 to 1 kb in length; the target site is within a region of the plant genome of low a DNA methlyation; the target site is not within a region of the plant genome associated with at least one methylation read containing an MspJi motif or a LpnPI motif; and the target site is within a region of the plant genome that exhibits a total k-mer redundancy score of less than or equal to 30%. In some embodiments, the total k-mer redundancy score is less than or equal to 30%, 29%, 28%, 27%, 26%, 25%, 24%, 23%, 22%, 21%, 20%, 19%, 18%, 17%, 16%, 15%, 14%, 13%, 12%, 11%, or 10%. In some embodiments, the target site is within a 100 bp, 150 bp, 200 bp, 250 bp, 300 bp, 350 bp, 400 bp, 500 bp, 550 bp, 600 bp, 650 bp, 700 bp, 750 bp, 800 bp, 850 bp, 900 bp, 950 bp, or 1,000 bp region of the plant genome that exhibits redundancy score of less than or equal 30%, 29%, 28%, 27%, 26%, 25%, 24%, 23%, 22%, 21%, 20%, 19%, 18%, 17%, 16%, 15%, 14%, 13%, 12%, 11%, or 10%.

[0063] As used herein, the term “repeat region” refers to a region that is identified by alignment of the host sequence to an annotated second sequence comprising repeat regions wherein the annotation is compiled with genomic repeat identification software.

[0064] As used herein, the term “repressive chromatin mark” refers to a statistically significant H3K27me3 (p-value≤5e-3) peak using ChIP-seq peak calling software.

[0065] As used herein, the term “small RNA (sRNA) hotspot” refers to a sequence location from 0.2 to 1 Kb in length with statistically significant sRNA abundance (p-value≤5e-3) relative to population average. To identify sRNA hotspots, germplasm-specific sRNA transcripts 21, 22, and 24 nucleotides long, with calculated abundances at least 1 RPM (read per million), are mapped to the genomic sequence to identify regions of high sRNA abundance (Heisel et al., (2008) PLoS ONE 3(8):1-10).

[0066] As used herein, the term “DNA methylated region” refers to a locus with a total number of overlapping, but not identical, methylation reads that represent at least 6% of methylation reads identified in the population average of the methylated region.

[0067] As used herein, the term “MspJi motif” refers to the consensus genomic sequence CNNR[N]16 (SEQ ID NO:552). The term “LpnPI motif” refers to the consensus genomic sequence CSD[N]16 (SEQ ID NO:553). MspJI is a modification-dependent restriction endonuclease that cleaves at a fixed distance away from the modification site. MspJI homologs include, but are not limited to, FspEI, LpnPI, AspBHI, RlaI, and SgrTI. All the enzymes specifically recognize cytosine C5 modification (methylation or hydroxymethylation) in DNA and cleave at a constant distance (N12/N16) away from the modified cytosine. Each MspJI homolog displays its own sequence context preference, favoring different nucleotides flanking the modified cytosine.

[0068] As used herein, the term “k-mer redundancy score” is used to calculate a genome redundancy score that quantifies the likelihood of an unique site for site-specific genome modification enzyme cutting, with little off-target effect. The total redundancy score for a selected genomic region is calculated as the percentage of redundant k-mers present in the region. As used herein, “total redundancy score” is calculated as the number of redundant k-mers (having a redundancy score >1) in the region, divided by the total number of k-mers in that region (1000−k for a 1 Kb region), multiplied by 100. In one aspect of the present disclosure, genomic regions with a total redundancy score of 30 or lower (at least 70% of the k-mers in the intergenic region are unique) is accepted for consideration. In some embodiments, genomic regions with a total redundancy score of 35, 30, 25, 20, 15, 10, 5 or lower is accepted for consideration.

[0069] In some embodiments, the agronomic trait is selected from one or more of the group consisting of: yield, ear relative maturity, ear height, ear number, increased ear size, grain moisture, increased ear dry weight per plant, increased number of kernels per ear, increased weight per kernel, increased number of kernels per plant, decreased ear void, extended grain fill period, test weight, pod number, number of seed per pod, pod position on the plant, number of internodes, incidence of pod shatter, grain size, decreased days from planting to maturity, increased stalk size, increased number of leaves, increased plant height growth rate in vegetative stage, plant architecture, resistance to lodging, percent seed germination, seedling vigor, juvenile traits, efficiency of germination (including germination in stressed conditions), growth rate (including growth rate in stressed conditions), increased number of root branches, increased total root length, efficiency of nodulation and nitrogen fixation, enhanced nitrogen use efficiency, increased water use efficiency as compared to a control plant, efficiency of nutrient assimilation, resistance to biotic stress, resistance to abiotic stress, carbon assimilation, physiology, enhanced disease or pest resistance, or environmental or chemical tolerance, enhanced cold tolerance, nutritional enhancement, enhanced seed protein, enhanced seed starch, enhanced seed oil, plant height, enhanced plant morphology, growth and development, and stay green rating.

[0070] In some embodiments, the donor sequence comprises a gene expression cassette comprising a sequence selected from an insecticidal resistance gene, a herbicide tolerance gene, a nitrogen use efficiency gene, a water use efficiency gene, a nutritional quality gene, a DNA binding gene, a selectable marker gene, and any combination thereof.

[0071] In some embodiments, the donor sequence is an exogenous sequence. In some embodiments, the donor sequence comprises an expression cassette.

[0072] In some embodiments, the donor sequence comprises a nucleotide sequence that contains at least one functional element, where the functional element is capable of assisting in the insertion, the expression, or the identification of the donor sequence. In some embodiments, the functional element is a promoter, a selectable marker gene, or a targeting sequence.

[0073] In some embodiments, the DNA of interest is integrated into the target site via a homologous recombination. In other embodiments, the DNA of interest is integrated into the target site via a non-homologous end joining.

[0074] In some embodiments, DNA of interest is integrated into the target site via a site-specific genome modification enzyme. In some embodiments, the site-specific genome modification enzyme is selected from an endonuclease, a recombinase, a transposase, and any combination thereof. In some embodiments, the endonuclease is selected from a meganuclease, a zinc finger nuclease, a transcription activator-like effector nuclease (TALEN), a Cas9 nuclease, a Cpf1 nuclease, a Cas12a nuclease, a Cas12e nuclease, a CasX nuclease, a Cas12d nuclease, a CasY nuclease, a Cas12b nuclease, a C2C1 nuclease, a Cas12c nuclease, a C2C3 nuclease, a C2C4 nuclease, a C2C5 nuclease, a C2C6 nuclease, a C2C7 nuclease, a C2C8 nuclease, a C2C9 nuclease, a C2C10 nuclease, a Cas13a nuclease, a Cas13b nuclease, and a Cas13c nuclease. In some embodiments, the recombinase is a tyrosine recombinase attached to a DNA recognition motif, or a serine recombinase attached to a DNA recognition motif. In some embodiments, the tyrosine recombinase attached to a DNA recognition motif is selected from the group consisting of a Cre recombinase, a Flp recombinase, and a Tnp1 recombinase. In some embodiments, the serine recombinase attached to a DNA recognition motif is selected from the group consisting of a PhiC31 integrase, an R4 integrase, and a TP-901 integrase. In some embodiments, the transposase is a DNA transposase attached to a DNA binding domain.

[0075] In some embodiments, a TALEN target site comprises a 5′-TALEN binding site, a spacer sequence, and a 3′TALEN binding site. In some embodiments, the TALEN binding sites within the TALEN target site of corn genomic regions is selected from the SEQ ID NOs presented in Table 1. In some embodiments, the TALEN binding sites within the TALEN target site of soybean genomic region is selected from the SEQ ID NOs presented in Table 2.

[0076] The present disclosure also provides a plant, plant cell, or plant part comprising a recombinant sequence as disclosed herein.

[0077] In certain embodiments, the plant is selected from: alfalfa, aneth, apple, apricot, artichoke, arugula, asparagus, avocado, banana, barley, beans, beet, blackberry, blueberry, broccoli, brussel sprouts, cabbage, canola, cantaloupe, carrot, cassava, cauliflower, celery, cherry, cilantro, citrus, clementine, coffee, corn, cotton, cucumber, Douglas fir, eggplant, endive, escarole, eucalyptus, fennel, figs, gourd, grape, grapefruit, honey dew, jicama, kiwifruit, lettuce, leeks, lemon, lime, Loblolly pine, mango, melon, mushroom, nut, oat, okra, onion, orange, an ornamental plant, papaya, parsley, pea, peach, peanut, pear, pepper, persimmon, pine, pineapple, plantain, plum, pomegranate, poplar, potato, pumpkin, quince, radiata pine, radicchio, radish, raspberry, rice, rye, sorghum, Southern pine, soybean, spinach, squash, strawberry, sugarbeet, sugarcane, sunflower, sweet potato, sweetgum, tangerine, tea, tobacco, tomato, turf, a vine, watermelon, wheat, yams, and zucchini plants.

[0078] Methods of transforming plants and plant cells are well known by persons of ordinary skill in the art. For instance, specific instructions for transforming plant cells by microprojectile bombardment with particles coated with recombinant DNA are found in U.S. Pat. No. 5,015,580 (soybean); U.S. Pat. No. 5,550,318 (corn); U.S. Pat. No. 5,538,880 (corn); U.S. Pat. No. 5,914,451 (soybean); U.S. Pat. No. 6,160,208 (corn); U.S. Pat. No. 6,399,861 (corn); U.S. Pat. No. 6,153,812 (wheat); U.S. Pat. No. 6,002,070 (rice); U.S. Pat. No. 7,122,722 (cotton); U.S. Pat. No. 6,051,756 (Brassica); U.S. Pat. No. 6,297,056 (Brassica); US Patent Publication 20040123342 (sugarcane) and Agrobacterium-mediated transformation is described in U.S. Pat. No. 5,159,135 (cotton); U.S. Pat. No. 5,824,877 (soybean); U.S. Pat. No. 5,591,616 (corn); U.S. Pat. No. 6,384,301 (soybean); U.S. Pat. No. 5,750,871 (Brassica); U.S. Pat. No. 5,463,174 (Brassica); and 5,188,958 (Brassica), all of which are incorporated herein by reference. Methods for transforming other plants can be found in, for example, Compendium of Transgenic Crop Plants (2009) Blackwell Publishing. Any appropriate method known to those skilled in the art can be used to transform a plant cell with any of the nucleic acid molecules provided herein.

[0079] In one aspect, a plant cell provided herein is stably transformed. As used herein, “stably transformed” refers to a transfer of DNA into a genome of a targeted cell that allows the targeted cell to pass the transferred DNA to the next generation. In another aspect, a plant cell provided herein is transiently transformed. As used herein, “transiently transformed” is defined as a transfer of DNA into a cell that is not integrated into a genome of the transformed cell.

[0080] In an aspect, a plant cell provided herein is selected from the group consisting of an Acacia cell, an alfalfa cell, an aneth cell, an apple cell, an apricot cell, an artichoke cell, an arugula cell, an asparagus cell, an avocado cell, a banana cell, a barley cell, a bean cell, a beet cell, a blackberry cell, a blueberry cell, a broccoli cell, a Brussels sprout cell, a cabbage cell, a canola cell, a cantaloupe cell, a carrot cell, a cassava cell, a cauliflower cell, a celery cell, a Chinese cabbage cell, a cherry cell, a cilantro cell, a citrus cell, a clementine cell, a coffee cell, a corn cell, a cotton cell, a cucumber cell, a Douglas fir cell, an eggplant cell, an endive cell, an escarole cell, an eucalyptus cell, a fennel cell, a fig cell, a forest tree cell, a gourd cell, a grape cell, a grapefruit cell, a honey dew cell, a jicama cell, kiwifruit cell, a lettuce cell, a leek cell, a lemon cell, a lime cell, a Loblolly pine cell, a mango cell, a maple tree cell, a melon cell, a mushroom cell, a nectarine cell, a nut cell, an oat cell, an okra cell, an onion cell, an orange cell, an ornamental plant cell, a papaya cell, a parsley cell, a pea cell, a peach cell, a peanut cell, a pear cell, a pepper cell, a persimmon cell, a pine cell, a pineapple cell, a plantain cell, a plum cell, a pomegranate cell, a poplar cell, a potato cell, a pumpkin cell, a quince cell, a radiata pine cell, a radicchio cell, a radish cell, a rapeseed cell, a raspberry cell, a rice cell, a rye cell, a sorghum cell, a Southern pine cell, a soybean cell, a spinach cell, a squash cell, a strawberry cell, a sugar beet cell, a sugarcane cell, a sunflower cell, a sweet corn cell, a sweet potato cell, a sweetgum cell, a tangerine cell, a tea cell, a tobacco cell, a tomato cell, a turf cell, a vine cell, watermelon cell, a wheat cell, a yam cell, and a zucchini cell. In another aspect, a plant cell provided herein is selected from the group consisting of a corn cell, a soybean cell, a canola cell, a cotton cell, a wheat cell, and a sugarcane cell.

[0081] In another aspect, a plant cell provided herein is selected from the group consisting of a corn immature embryo cell, a corn mature embryo cell, a corn seed cell, a soybean immature embryo cell, a soybean mature embryo cell, a soybean seed cell, a canola immature embryo cell, a canola mature embryo cell, a canola seed cell, a cotton immature embryo cell, a cotton mature embryo cell, a cotton seed cell, a wheat immature embryo cell, a wheat mature embryo cell, a wheat seed cell, a sugarcane immature embryo cell, a sugarcane mature embryo cell, a sugarcane seed cell.

[0082] In one aspect, plant cells disclosed herein include, but are not limited to, a seed cell, a fruit cell, a leaf cell, a cotyledon cell, a hypocotyl cell, a meristem cell, an embryo cell, an endosperm cell, a root cell, a shoot cell, a stem cell, a pod cell, a flower cell, an inflorescence cell, a stalk cell, a pedicel cell, a style cell, a stigma cell, a receptacle cell, a petal cell, a sepal cell, a pollen cell, an anther cell, a filament cell, an ovary cell, an ovule cell, a pericarp cell, a phloem cell, a bud cell, or a vascular tissue cell. In another aspect, this disclosure provides a plant chloroplast. In a further aspect, this disclosure provides an epidermal cell, a stomata cell, a trichome cell, a root hair cell, a storage root cell, or a tuber cell. In another aspect, this disclosure provides a protoplast. In another aspect, this disclosure provides a plant callus cell.

[0083] In one aspect, the instant disclosure provides a plant, plant cell, or plant part that is transformed by any method provided herein.

[0084] To confirm the presence of integrated DNA in a transformed cell or genome a variety of assays can be performed. Such assays include, for example, molecular biological assays (e.g., Southern and northern blotting, PCR); biochemical assays, such as detecting the presence of a protein product (e.g., by immunological means (ELISAs and western blots), or by enzymatic function (e.g., GUS assay); pollen histochemistry; plant part assays, (e.g., leaf or root assays); and, by analyzing the phenotype of the whole regenerated plant.

### Site-Specific Genome Modification Enzymes

[0085] As used herein, the term “double-strand break inducing agent” refers to any agent that can induce a double-strand break (DSB) on a DNA molecule. In some embodiments, the double-strand break inducing agent is a site-specific genome modification enzyme.

[0086] As used herein, the term “site-specific genome modification enzyme” refers to any enzyme that can modify a nucleotide sequence in a site-specific manner. In the present disclosure, site-specific genome modification enzymes include endonucleases, recombinases, transposases, helicases and any combination thereof.

[0087] Several embodiments relate to promoting recombination by providing a site-specific genome modification enzyme. As used herein, the term “site-specific enzyme” refers to any enzyme that can modify a nucleotide sequence in a site-specific manner. In some embodiments, recombination is promoted by providing a single-strand break inducing agent. In some embodiments, recombination is promoted by providing a double-strand break inducing agent. In some embodiments, recombination is promoted by providing a strand separation inducing reagent. In one aspect, the site-specific genome modification enzyme is selected from an endonuclease, a recombinase, a transposase, a helicase or any combination thereof.

[0088] In one aspect, the endonuclease is selected from a meganuclease, a zinc-finger nuclease (ZFN), a transcription activator-like effector nucleases (TALEN), an Argonaute (non-limiting examples of Argonaute proteins include Thermus thermophilus Argonaute (TtAgo), Pyrococcus furiosus Argonaute (PfAgo), Natronobacterium gregoryi Argonaute (NgAgo), an RNA-guided nuclease, such as a CRISPR associated nuclease (non-limiting examples of CRISPR associated nucleases include Cast, Cas1B, Cas2, Cas3, Cas4, Cas5, Cas6, Cas7, Cas8, Cas9 (also known as Csn1 and Csx12), Cas10, Ca12a, Cas12b, Cas12e, Cas12d, Cas13a, Cas13, Cas13c, Csy1, Csy2, Csy3, Cse1, Cse2, Csc1, Csc2, Csa5, Csn2, Csm2, Csm3, Csm4, Csm5, Csm6, Cmr1, Cmr3, Cmr4, Cmr5, Cmr6, Csb1, Csb2, Csb3, Csx17, Csx14, Csx10, Csx16, CsaX, Csx3, Csx1, Csx15, Csf1, Csf2, Csf3, Csf4, Cpf1, C2C1, C2C3, C2C4, C2C5, C2C6, C2C7, C2C8, c2C9, C2C10, CasX, CasY homologs thereof, or modified versions thereof).

[0089] In another aspect, the endonuclease is a dCas9-recombinase fusion protein. As used herein, a “dCas9” refers to a Cas9 endonuclease protein with one or more amino acid mutations that result in a Cas9 protein without endonuclease activity, but retaining RNA-guided site-specific DNA binding. As used herein, a “dCas9-recombinase fusion protein” is a dCas9 with a protein fused to the dCas9 in such a manner that the recombinase is catalytically active on the DNA.

[0090] Non-limiting examples of recombinase include a tyrosine recombinase attached to a DNA recognition motif provided herein is selected from the group consisting of a Cre recombinase, a Gin recombinase a Flp recombinase, and a Tnp1 recombinase. In an aspect, a Cre recombinase or a Gin recombinase provided herein is tethered to a zinc-finger DNA-binding domain, or a TALE DNA-binding domain, or a Cas9 nuclease. In another aspect, a serine recombinase attached to a DNA recognition motif provided herein is selected from the group consisting of a PhiC31 integrase, an R4 integrase, and a TP-901 integrase. In another aspect, a DNA transposase attached to a DNA binding domain provided herein is selected from the group consisting of a TALE-piggyBac and TALE-Mutator.

[0091] Site-specific genome modification enzymes, such as meganucleases, ZFNs, TALENs, Argonaute proteins (non-limiting examples of Argonaute proteins include Thermus thermophilus Argonaute (TtAgo), Pyrococcus furiosus Argonaute (PfAgo), Natronobacterium gregoryi Argonaute (NgAgo), homologs thereof, or modified versions thereof), RNA-guided nucleases (non-limiting examples of RNA-guided nucleases include the CRISPR associated nucleases, such as Cas1, Cas1B, Cas2, Cas3, Cas4, Cas5, Cas6, Cas7, Cas8, Cas9 (also known as Csn1 and Csx12), Cas10, Ca12a, Cas12b, Cas12e, Cas12d, Cas13a, Cas13, Cas13c, Csy1, Csy2, Csy3, Cse1, Cse2, Csc1, Csc2, Csa5, Csn2, Csm2, Csm3, Csm4, Csm5, Csm6, Cmr1, Cmr3, Cmr4, Cmr5, Cmr6, Csb1, Csb2, Csb3, Csx17, Csx14, Csx10, Csx16, CsaX, Csx3, Csx1, Csx15, Csf1, Csf2, Csf3, Csf4, Cpf1, C2C1, C2C3, C2C4, C2C5, C2C6, C2C7, C2C8, c2C9, C2C10, CasX, CasY, homologs thereof, or modified versions thereof) and engineered RNA-guided nucleases (RGNs), induce a genome modification such as a double-stranded DNA break (DSB) or single-strand DNA break at the target site of a genomic sequence that is then repaired by the natural processes of homologous recombination (HR) or non-homologous end-joining (NHEJ). Sequence modifications then occur at the cleaved sites, which can include deletions or insertions that result in gene disruption in the case of NHEJ, or integration of exogenous sequences by homologous recombination.

[0092] In one aspect of the present disclosure, site-specific genome modification enzymes are selected to induce a genome modification in one, a few, or many individual target sequences of the plant genomic sequences provided herein. After exposure to the site-specific genome modification enzyme, the resulting recombinant nucleic acid can be identified in various ways including sequencing, PCR amplification, Southern analysis, or other molecular methods used to detect recombinant nucleic acid sequence. Site-specific genome modification enzymes may be expressed in plants such that one or more genome modifications occur within a genomic locus, and resulting progeny screened for molecular changes.

[0093] Any of the DNA of interest provided herein can be integrated into a target site of a plant genomic sequence by introducing the DNA of interest and the provided site-specific genome modification enzymes. Any method provided herein can utilize any site-specific genome modification enzyme provided herein.

[0094] ZFNs

[0095] Zinc finger nucleases (ZFNs) are synthetic proteins characterized by an engineered zinc finger DNA-binding domain fused to the cleavage domain of the FokI restriction endonuclease. ZFNs can be designed to cleave almost any long stretch of double-stranded DNA for modification of the zinc finger DNA-binding domain. ZFNs form dimers from monomers composed of a non-specific DNA cleavage domain of FokI endonuclease fused to a zinc finger array engineered to bind a target DNA sequence.

[0096] The DNA-binding domain of a ZFN is typically composed of 3-4 zinc-finger arrays. The amino acids at positions −1, +2, +3, and +6 relative to the start of the zinc finger co-helix, which contribute to site-specific binding to the target DNA, can be changed and customized to fit specific target sequences. The other amino acids form the consensus backbone to generate ZFNs with different sequence specificities. Rules for selecting target sequences for ZFNs are known in the art.

[0097] The FokI nuclease domain requires dimerization to cleave DNA and therefore two ZFNs with their C-terminal regions are needed to bind opposite DNA strands of the cleavage site (separated by 5-7 bp). The ZFN monomer can cute the target site if the two-ZF-binding sites are palindromic. The term ZFN, as used herein, is broad and includes a monomeric ZFN that can cleave double stranded DNA without assistance from another ZFN. The term ZFN is also used to refer to one or both members of a pair of ZFNs that are engineered to work together to cleave DNA at the same site.

[0098] Because the DNA-binding specificities of zinc finger domains can in principle be re-engineered using one of various methods, customized ZFNs can theoretically be constructed to target nearly any gene sequence. Publicly available methods for engineering zinc finger domains include Context-dependent Assembly (CoDA), Oligomerized Pool Engineering (OPEN), and Modular Assembly.

[0099] TALENs

[0100] Transcription activator-like effectors (TALEs) can be engineered to bind practically any DNA sequence. TALE proteins are DNA-binding domains derived from various plant bacterial pathogens of the genus Xanthomonas. The X pathogens secrete TALEs into the host plant cell during infection. The TALE moves to the nucleus, where it recognizes and binds to a specific DNA sequence in the promoter region of a specific DNA sequence in the promoter region of a specific gene in the host genome. TALE has a central DNA-binding domain composed of 13-28 repeat monomers of 33-34 amino acids. The amino acids of each monomer are highly conserved, except for hypervariable amino acid residues at positions 12 and 13. The two variable amino acids are called repeat-variable diresidues (RVDs). The amino acid pairs NI, NG, HD, and NN of RVDs preferentially recognize adenine, thymine, cytosine, and guanine/adenine, respectively, and modulation of RVDs can recognize consecutive DNA bases. This simple relationship between amino acid sequence and DNA recognition has allowed for the engineering of specific DNA binding domains by selecting a combination of repeat segments containing the appropriate RVDs. The transcription activator-like effector (TALE) DNA binding domain can be fused to a functional domain, such as a recombinase, a nuclease, a transposase or a helicase, thus conferring sequence specificity to the functional domain.

[0101] Transcription activator-like effector nucleases (TALENs) are artificial restriction enzymes generated by fusing the transcription activator-like effector (TALE) DNA binding domain to a nuclease domain. The term TALEN, as used herein, is broad and includes a monomeric TALEN that can cleave double stranded DNA without assistance from another TALEN. The term TALEN is also used to refer to one or both members of a pair of TALENs that work together to cleave DNA at the same site. In some embodiments, the nuclease is selected from a group consisting of PvuII, MutH, TevI, FokI, AlwI, MlyI, SbfI, SdaI, StsI, CleDORF, Clo051, and Pept071. When FokI is fused to a TALE domain each member of the TALEN pair binds to the DNA sites flanking a target site, the FokI monomers dimerize and cause a DSB at the target site.

[0102] Besides the wild-type FokI cleavage domain, variants of the FokI cleavage domain with mutations have been designed to improve cleavage specificity and cleavage activity. The FokI domain functions as a dimer, requiring two constructs with unique DNA binding domains for sites in the target genome with proper orientation and spacing. Both the number of amino acid residues between the TALEN DNA binding domain and the FokI cleavage domain, and the number of bases between the two individual TALEN binding sites are parameters for achieving high levels of activity. PvuII, MutH, and TevI cleavage domains are useful alternatives to FokI and FokI variants for use with TALEs. PvuII functions as a highly specific cleavage domain when coupled to a TALE (see Yank et al. 2013. PLoS One. 8: e82539). MutH is capable of introducing strand-specific nicks in DNA (see Gabsalilow et al. 2013. Nucleic Acids Research. 41: e83). TevI introduces double-stranded breaks in DNA at targeted sites (see Beurdeley et al., 2013. Nature Communications. 4: 1762).

[0103] The relationship between amino acid sequence and DNA recognition of the TALE binding domain allows for designable proteins. Software programs such as DNA Works can be used to design TALE constructs. Other methods of designing TALE constructs are known to those of skill in the art. Doyle et al. (2012) TAL Effector-Nucleotide Targeter (TALE-NT) 2.0: tools for TAL effector design and target prediction. Nucleic Acids Res. 40(W1):W117-W122; Cermak (2011). Efficient design and assembly of custom TALEN and other TAL effector-based constructs for DNA targeting. Nucleic Acids Res. 39(12):e82.

[0104] Meganucleases

[0105] Meganucleases, which are commonly identified in microbes, are unique enzymes with high activity and long recognition sequences (>14 bp) resulting in site-specific digestion of target DNA. Engineered versions of naturally occurring meganucleases typically have extended DNA recognition sequences (for example, 14-40 bp).

[0106] The engineering of meganucleases is more challenging than that of ZFNs and TALENs because the DNA recognition and cleavage functions of meganucleases are intertwined in a single domain. Specialized methods of mutagenesis and high-throughput screening have been used to create novel meganuclease variants that recognize unique sequences and possess improved nuclease activity.

[0107] Argonaute

[0108] The Argonaute protein family is a DNA-guided endonuclease. The Argonaute isolated from Natronobacterium gregoryi has been reported to be suitable for DNA-guided genome editing in human cells (Gao, et al. DNA-guided genome editing using the Natronobacterium gregoryi Argonaute. Nature Biotechnology 34:768-773 (2016). Argonaute endonucleases from other species have been identified, (non-limiting examples of Argonaute proteins include Thermus thermophilus Argonaute (TtAgo), Pyrococcus furiosus Argonaute (PfAgo), Natronobacterium gregoryi Argonaute (NgAgo), homologs thereof, or modified versions thereof). A sequence encoding a DNA guide is associated with each of these unique Argonaute endonucleases.

[0109] CRISPR

[0110] The CRISPR (clustered regularly interspaced short palindromic repeats)/Cas (CRISPR-associated) system is an alternative to synthetic proteins whose DNA-binding domains enable them to modify genomic DNA at specific sequences (e.g., ZFN and TALEN). Specificity of the CRISPR/Cas system is based on an RNA-guide that use complementary base pairing to recognize target DNA sequences. In some embodiments, the site-specific genome modification enzyme is a CRISPR/Cas system. In an aspect, a site-specific genome modification enzyme provided herein can comprise any RNA-guided Cas nuclease (non-limiting examples of RNA-guided nucleases include Cast, Cas1B, Cas2, Cas3, Cas4, Cas5, Cas6, Cas7, Cas8, Cas9 (also known as Csn1 and Csx12), Cas10, Ca12a, Cas12b, Cas12e, Cas12d, Cas13a, Cas13, Cas13c, Csy1, Csy2, Csy3, Cse1, Cse2, Csc1, Csc2, Csa5, Csn2, Csm2, Csm3, Csm4, Csm5, Csm6, Cmr1, Cmr3, Cmr4, Cmr5, Cmr6, Csb1, Csb2, Csb3, Csx17, Csx14, Csx10, Csx16, CsaX, Csx3, Csx1, Csx15, Csf1, Csf2, Csf3, Csf4, Cpf1, C2C1, C2C3, C2C4, C2C5, C2C6, C2C7, C2C8, c2C9, C2C10, CasX, CasY, homologs thereof, or modified versions thereof); and, optionally, the tracr and/or guide RNA necessary for targeting the respective nucleases.

[0111] CRISPR/Cas systems are part of the adaptive immune system of bacteria and archaea, protecting them against invading nucleic acids such as viruses by cleaving the foreign DNA in a sequence-dependent manner. The immunity is acquired by the integration of short fragments of the invading DNA known as spacers between two adjacent repeats at the proximal end of a CRISPR locus. The CRISPR arrays, including the spacers, are transcribed during subsequent encounters with invasive DNA and are processed into small interfering CRISPR RNAs (crRNAs) approximately 40 nt in length, which combine with the trans-activating CRISPR RNA (tracrRNA) to activate and guide the Cas9 nuclease. This cleaves homologous double-stranded DNA sequences known as protospacers in the invading DNA. A prerequisite for cleavage is the presence of a conserved protospacer-adjacent motif (PAM) downstream of the target DNA, which usually has the sequence 5′-NGG-3′ but less frequently 5′-NAG-3′. Specificity is provided by the so-called “seed sequence” approximately 12 bases upstream of the PAM, which must match between the RNA and target DNA. Cpf1 acts in a similar manner to Cas9, but Cpf1 does not require a separate tracrRNA.

[0112] The following Examples are presented for the purposes of illustration and should not be construed as limitations.

### EXAMPLES

### Example 1: Target Site Selection

[0113] A flowchart for selecting target sites for site-specific genome modification (including, integration of a DNA of interest into a genomic sequence) is shown in FIG. 1. This flowchart illustrates steps that include bioinformatic analysis of a host genome and the application of specific selection criteria to identify target sites for site-specific genome modification. The analysis includes one or more of the following site-specific selection criteria: 1) selection of an initial haplotype window that has a neutral or positive association with an agronomic trait, 2) the target site is within an intergenic region, 3) the target site is greater than or equal to 1 kb away from a long repeat region, 4) the target site is greater than or equal to 1 kb away from a repressive chromatin mark (e.g., H3K27me3 peak), 5) the target site is within a region with a low redundancy score (less-than or equal to 30%), 6) the target site is within a region with a low DNA methylation score (less-than or equal to 10% of genome wide population average), 7) the target site is greater-than or equal to 200 bp away from a small RNA (sRNA) hotspot, 8) selecting areas targetable by site-specific genome modification enzymes.

[0114] For ease of presentation, the target site selection process is presented as the flowchart in FIG. 1. The steps in which the target site selection criteria are completed may be in any order. For example, the step of determining if a target site is within a region with a low redundancy score (less-than or equal to 30%) may be completed prior the step of determining whether the target site is within an intergenic region. In some instances, not all the criteria will be used to select a target site.

[0115] The first step shown in FIG. 1 is the selection of a haplotype window that has a neutral or positive association with an agronomic trait. This haplotype window would be located within a region of low genetic diversity (defined as, ten or fewer haplotypes), and at least 1 cM away from a haplotype window associated with yield drag (or drag of another undesired agronomic trait). The specific target site is selected from a sequence within the low diversity haplotype window. Low genetic diversity is defined as having between one and ten distinguishable haplotypes across all germplasm in the intended heterotic group, the intended maturity group, or the intended heterotic and maturity group, such as disclosed in US Patent Pub. No. 2013/0276173, which is incorporated here in its entirety. Inserting new donor nucleotides near positive haplotype windows within genetic distance of 0.1 cM to 5 cM minimizes the likelihood that trait associations will be disrupted by genetic recombination, and allows trait stacking of favorable genes. Short genetic distance would allow negative traits to be bred out, but only after conducting prolonged and expensive crossing experiments.

[0116] Another step in the target site selection process is to select a specific target site that is within an intergenic region. Selection of an intergenic region is done to avoid disruption of endogenous genes. Genomic regions immediately upstream (5′) or downstream (3′) of genes are avoided as sites for genome modification, as these regions may contain regulatory sequences required for proper gene function. Although genes, and regions located less than 2 Kb from either the 5′ or the 3′ end of these genes are avoided as target sites for genome modification, the sequence is included in further analysis steps because the genomic regions could function as a homology region for targeted integration of a DNA of interest by homologous recombination. Bioinformatic analysis is done using publicly available annotation of particular genomes to identify genic regions. Specific target sites are selected that are greater than or equal to 2 Kb from either the 5′- or 3′-end of known genes and within the selected haplotype window. The intergenic regions remaining after discarding coding regions in the haplotype window form the pool of potential sites for the next phase of target site selection.

[0117] A further step in the target site selection process is to select a region that is not in or adjacent to genomic repeat regions. Highly repetitive DNA is frequently found in heterochromatic genomic regions. Due to the repeat structure, site-specific genome modification may be inefficient and/or result in reduced agronomic benefit. For example, with integration of a transgenic expression cassette, the repeat region may result in reduced transcription of the transgene cassette resulting in reduced expression of the transgene. For the analysis, the sequence of the genomic regions within selected low diversity haplotype windows are evaluated bioinformatically to identify specific nucleotide coordinates of repeat regions, and then further analyzed by visualization in using Genome Browser tools (Kent et al. (2002) Genome Res. 12(6):996-1006). Genomic regions located in repeat regions greater than 2 Kb long plus a 1 Kb buffer zone on either end of the repeat region (4 kb total) are excluded for specific target site selection. Repeat regions less than 2 Kb long are included in the pool of potential target sites.

[0118] A further step in the target site selection process is to select a region that is lacking in repressive chromatin marks. Histones are the primary protein components of chromatin, and H3K27me3 is a well-known histone H3 modification that is associated with facultatively repressed genes. H3K27me3 levels in corn were identified using the ChIP-seq method followed by Illumina sequencing (Deng, J. et al. (2009) Nat. Biotechnol. 27, 353-360). The sequence of the genomic regions within the selected low diversity haplotype windows are evaluated with MACS software (Zhang et al. (2008) Genome Biol. 9(9):R137) to identify sequence predicted to have chromatin peaks based on the ChIP-seq analysis. Specific target sites were selected which were greater than or equal to 1 kb away from these repressive chromatin marks.

[0119] Another step in the target site selection process is to select a target site that is within a region with a low redundancy score (less-than or equal to 30%). A redundancy score is a mathematical measure of the likelihood that the sequence is unique in the genome. The redundancy score is calculated by a using a binned k-mer approach where a k-mer window is selected and a scanning window is used to shift the k-mer window 1-nucleotide in the 3′ direction along the entire host genome. The k-mer redundancy count is calculated by summing the number of times there is a perfect nucleotide match (100% sequence identify) for each k-mer sequence in the host genome. A unique k-mer has a redundancy count equal to 1, as this nucleotide sequence occurs exactly once in the reference genome. A redundant k-mer has a redundancy count of greater than 1, as this nucleotide sequence occurs more than once in the reference genome.

[0120] The total redundancy score for a selected genomic region is calculated as the percent of redundant k-mers present in a specific genomic region. For example, a total redundancy score for genomic region at least 1000 nucleotides long is selected for analysis, and the total number of unique k-mers (k-mer redundancy count of 1) vs. redundant k-mers (k-mer redundancy count greater than 1) are calculated. The total number of k-mers within the 1000 nucleotide region is equal to (1000−k), where k is the number of nucleotides in each k-mer. The total redundancy score is calculated as the number of redundant k-mers in a region, divided by the total number of k-mers in that region, multiplied by 100. A total redundancy score of 30% indicates that at least 70% of the k-mers in the genomic region are unique.

[0121] Another step in the target site selection process is to select sites within low DNA methylation regions. DNA methylation is a common epigenetic mechanism to reduce gene expression. DNA methylation has been reported to interfere with TALEN activity (Bultmann S., et al. (2012) Targeted transcriptional activation of silent oct4 pluripotency gene by combining designer TALEs and inhibition of epigenetic modifiers. Nucleic Acids Res. 40, 5368-5377). DNA methylation regions were identified by digesting corn genomic DNA with a cocktail of DNA-methylation sensitive enzymes per supplier protocols (New England Biolabs, Ipswich, Mass.). The DNA fragments (20-40 nucleotides long) were extracted, and a DNA library was prepared using the ThruPLEX-FD® DNA-seq kit (Rubicon Genomics, Ann Arbor, Mich.). Next, libraries were sequenced using the TruSeq® DNA Methylation kit (Illumina Inc., San Diego, Calif.), and DNA methylation reads were mapped to their corresponding loci on the corn genome. Genomic loci associated with a cluster of overlapping but non-identical reads that represent 10% of genome wide population average are classified as DNA methylated regions and were excluded from target site selection. In other examples, a cluster of at least four overlapping but non-identical reads were classified as a DNA methylated region and were excluded from target site selection.

[0122] Another step in the target site selection process is to select target sites ≥200 bp away from a small RNA (sRNA) hotspot, where a sRNA hotspot is a region with high sRNA abundance. A sRNA hotspot may function as sRNA binding sites if this region of the genome is included in pre-mRNA transcripts generated during transcription of genes (mRNA transcripts from either endogenous genes or from transgene cassettes) in the vicinity of sRNA hotspots. To identify sRNA hotspots, germplasm-specific sRNA transcripts 21, 22, and 24 nucleotides long, with calculated abundances at least 1 RPM (read per million), are mapped to the genomic sequence to identify regions of high sRNA abundance (Heisel et al., (2008) PLoS ONE 3(8):1-10). For the purpose of genome modification, including site-specific integration of a DNA of interest, the target site selected is positioned ≥200 bp away from a small RNA (sRNA) hotspot.

[0123] In some instances, a target site is selected that is in a region (≤200 nucleotides) of an sRNA hotspot. If the target site is selected for integration of a transgene cassette, the orientation of integration of the transgene cassette can be designed such that the sRNA hotspot is in a ‘head-to-head’ orientation with the transgene cassette. This ‘head-to-head’ orientation is where the direction of transcription of the transgene cassette is in the opposite orientation of the direction of transcription of the sRNA hotspot within the genome. This head-to-head orientation will reduce the chance of incorporation of sRNA binding sites during transcription of mRNA from the transgene cassette.

[0124] When the target site is in a region (≤200 nucleotides) of an sRNA hotspot and the target site is selected for homology-dependent integration of a transgene cassette, then design of one or both homology arms of the transgene cassette is done to remove the sRNA hotspot during integration at the target site. Specifically, the homology arms of the transgene cassette are designed to have homology to a genomic within the sRNA hotspot, or flanking on the distal 5′-end (for a 5′ homology arm) or the distal 3′-end (for a 3′ homology arm) of the sRNA hotspot, and during the HR-dependent integration of the transgene cassette the process of homologous recombination effectively truncates and/or deletes the sRNA hotspot from the final transgenic genomic locus.

### Example 2: Site-Specific Genome Modification

[0125] The specific target site identified using the target site selection process detailed in Example 1 is used to inform the process of site-specific genome modification. For example, a site-specific genome modification enzyme delivery system is engineered and delivered to the plant cell.

[0126] In one example, a meganuclease is engineered to bind at the specific target site selected for genome modification. The sequence encoding the meganuclease is cloned into a plant expression vector, and delivered to the plant cell. If the genome modification is designed to induce a double-strand break (DSB) with non-homologous end joining (NHEJ) repair for introduction of insertions and deletions (indels), then just the engineered meganuclease is delivered to the plant cell. If a DNA of interest is to be incorporated at the target site, then the engineered meganuclease and the DNA of interest are co-delivered to the plant cell. The DNA of interest may integrate by NHEJ or by homology-dependent repair (HR). In the latter case, the DNA of interest will have at least one homology arm.

[0127] In another example, a Zinc Finger Nuclease (ZFN) is used to introduce the site-specific genome modification. In this case, the pair of ZFN molecules are designed and cloned into a plant expression vector and delivered to the plant cell. If the genome modification is designed to induce a double-strand break (DSB) with non-homologous end joining (NHEJ) repair for introduction of insertions and deletions (indels), then just the engineered ZFN is delivered to the plant cell. If a DNA of interest is to be incorporated at the target site, then the engineered ZFN and the DNA of interest are co-delivered to the plant cell. The DNA of interest may integrate by NHEJ or by homology-dependent repair (HR). In the latter case, the DNA of interest will have at least one homology arm.

[0128] In another example, a TAL-effector nuclease (TALEN) is used to introduce the site-specific genome modification. In this case, the pair of TALEN molecules are designed and cloned into a plant expression vector and delivered to the plant cell. A variety of tools known to one skilled in the art are available to design a TALEN for optimal activity for a selected target site. One example of a tool for TALEN design is described by Lin et al., (2014) Nucleic Acids Res. 2014 April; 42(6); and U.S. Patent Application Publication 20150132821. If the genome modification is designed to induce a double-strand break (DSB) with non-homologous end joining (NHEJ) repair for introduction of insertions and deletions (indels), then just the engineered TALEN is delivered to the plant cell. If a DNA of interest is to be incorporated at the target site, then the engineered TALEN and the DNA of interest are co-delivered to the plant cell. The DNA of interest may integrate by NHEJ or by homology-dependent repair (HR). In the latter case, the DNA of interest will have at least one homology arm.

[0129] In another example, an Argonaute is used to introduce the site-specific genome modification. In this case, the Argonaute molecule and a DNA guide molecule are designed and cloned into a plant expression vector and delivered to the plant cell. If the genome modification is designed to induce a double-strand break (DSB) with non-homologous end joining (NHEJ) repair for introduction of insertions and deletions (indels), then just the engineered Argonaute and DNA guide molecule are delivered to the plant cell. If a DNA of interest is to be incorporated at the target site, then the engineered Argonaute, DNA guide molecule, and the DNA of interest are co-delivered to the plant cell. The DNA of interest may integrate by NHEJ or by homology-dependent repair (HR). In the latter case, the DNA of interest will have at least one homology arm.

[0130] In another example, a CRISPR system is used to introduce the site-specific genome modification. In this case, the CRISPR associated nuclease and at least one RNA guide molecule are designed and cloned into a plant expression vector and delivered to the plant cell. If the genome modification is designed to induce a double-strand break (DSB) with non-homologous end joining (NHEJ) repair for introduction of insertions and deletions (indels), then just the engineered CRISPR nuclease and at least one RNA guide molecule are delivered to the plant cell. The RNA guide molecule may be a single guide RNA (sgRNA) or the RNA guide molecule may have both a tracer-RNA and guide-RNA component. If a DNA of interest is to be incorporated at the target site, then the engineered CRISPR nuclease, at least one RNA guide molecule, and the DNA of interest are co-delivered to the plant cell. The DNA of interest may integrate by NHEJ or by homology-dependent repair (HR). In the latter case, the DNA of interest will have at least one homology arm. An alternative to delivery of the engineered CRISPR nuclease as a DNA expression construct is the delivery of a Ribonucleo-protein (RNP) complex of the CRISPR associated nuclease protein in complex with the guide RNA.

[0131] Following delivery of the genome modification system to a plant cell, the cells or plants regenerated from the cells are sampled to confirm the presence of the intended site-specific genome modification. Methods of detecting the genome modification are known to one skilled in the art, and include: PCR, TaqMan® PCR, droplet digital PCR (ddPCR™, Bio-Rad Laboratories, Hercules, Calif.), sequencing, Sanger sequencing, ABI 3730 DNA fragment analysis (Applied Biosystems, Grand Island, N.Y.), Southern analysis, Northern analysis, phenotypic analysis, or any other technique known to one in the art to detect genome modification.

### Example 3: TALEN Target Site Selection in Corn

[0132] The genomic sequences for three separate corn germplasm (B73, 01DKD2, and LH244) were analyzed using the criteria detailed in Example 1 to identify specific target sites for genome modification by TALENs. From the analysis of the chromosome 1 genomic locus the B73 germplasm (chosen as being in a haplotype window associated with positive agronomic trait of insect resistance), 17 genomic regions containing TALEN targeting sites were identified, represented by SEQ ID NO:140 through SEQ ID NO:156. Using these 17 regions from the B73 germplasm analysis, 16 corresponding genomic regions containing TALEN targeting sites were identified in 01DKD2 germplasm, represented by SEQ ID NO:157 through SEQ ID NO:172. Using the 17 regions from the B73 germplasm analysis, 17 corresponding genomic regions in LH244 germplasm were identified, represented by SEQ ID NO:123 through SEQ ID NO:139. For each of the 17 genomic regions in the LH244 germplasm, there were from one to six separate TALEN target sites per genomic region, with a total of 61 separate TALEN targeting sites selected for testing TALEN activity (see Table 1).

[0133] As one representative example of the target site selection process, a genomic region on corn chromosome 1, represented by SEQ ID NO:130, was chosen initially as being within a haplotype window associated with a transgene insertion event with a positive agronomic trait. This haplotype window was approximately 36 Mb in length and was identified essentially as described in US Patent Pub. No. 20130276173. The relative position of SEQ ID NO:130 within a 10 kb region of the haplotype window is illustrated in FIG. 2.

[0134] As detailed in Example 1, the genomic sequence within the haplotype window was analyzed for genic and intergenic coordinates. From this analysis, an exon for a gene identified as GRMZM2G138382 was identified within the 10 kb window selected for analysis to identify a TALEN target site. Based on this analysis, and applying the criteria to include/exclude genic regions as detailed in Example 1, a genomic sequence of approximately 5 kb in length, as illustrated in FIG. 2, between Zm.B73 CR01 coordinates 287442 kb to 287447 kb, was selected for further analysis to identify a TALEN target site using additional selection criteria as detailed below.

[0135] As detailed in Example 1, the selected 5 kb genomic sequence was analyzed for regions of repetitive sequence. The reference corn genome for LH244 was analyzed in Genome Browser (Kent et al. (2002) Genome Res. 12(6):996-1006) and known repeat regions occurring within the selected 5 kb sequence were mapped. The analysis window from Genome Browser was inspected to identify repeat regions greater than 2 kb in length. One large repeat occurred within the preselected 10 kb region and this repeat plus 1 kb upstream, illustrated in FIG. 2, Zm.B73 CR01 between coordinates 287445.9 kb to 287229 kb, were excluded from further analysis. Combining the analysis of the haplotype window, the genic/intergenic regions, and the repetitive sequence, a genomic sequence of 3.5 kb (SEQ ID NO:130) was selected as a region to identify a TALEN target site, with the 1.6 kb sequence (SEQ ID NO:299) selected as the optimal region, thus avoiding the endogenous gene plus 2 kb buffer (Zm.B73 CR01 coordinates 287444 kb to 287445.9 kb), as illustrated in FIG. 2. This sequence was selected for further analysis to identify a TALEN target site using additional selection criteria as detailed below.

[0136] As detailed in Example 1, an analysis was done for the presence of repressive chromatin marks, assessed by H3K27me3 peaks. The nearest H3K27me3 peak occurred at the sequence identified by SEQ ID NO:293 (FIG. 2) positioned about 2 kb upstream of the genomic region selected to identify a TALEN target site (SEQ ID NO:299). Therefore, further analysis was done for the region represented by SEQ ID NO:299 to identify a TALEN target site using additional selection criteria as detailed below.

[0137] The genomic sequence (SEQ ID NO:299) was analyzed to identify sRNA binding sites as detailed in Example 1. Within the genomic sequence of the selected site (SEQ ID NO:299), two 24 nt sRNA hotspots were identified. One sRNA hotspot occurred approximately 160 bp upstream of the SEQ ID NO:299, and one sRNA hotspot occurred approximately 1400 bp downstream of the SEQ ID NO:299. Due to the proximity (160 bp) of the upstream sRNA hotspot, a transgene cassette is designed to integrate by homologous recombination into the TALEN target site in a head-to-head orientation relative to this sRNA hotspot. This orientation of the transgene cassette would reduce or eliminate run-on by Pol-II polymerase from extending transcription of the transgene mRNA transcript into the sRNA hotspot. Therefore, sRNA binding sites are not transcribed into the nacent transgene mRNA transcript, thus reducing the potential for sRNA induced transgene silencing.

[0138] As detailed in Example 1, the DNA methylation status within the genomic region was analyzed. Genome-wide DNA methylation profiling was performed by extracting DNA fragments (20-40 nt long) from corn tissue, and preparing a DNA library using the ThruPLEX-FD® DNA-seq kit (Rubicon Genomics, Ann Arbor, Mich.). The DNA libraries were sequenced using the TruSeq® DNA Methylation kit (Illumina Inc., San Diego, Calif.), and DNA reads were mapped to the sequences represented as SEQ ID NO:130, and SEQ ID NO:299 (FIG. 3). Because DNA methylation interferes with TALEN activity, sequence associated with a cluster of at least four overlapping but not identical reads were classified as a DNA methylation region, and were excluded as a TALEN target site. The DNA methylation profile for SEQ ID NO:130 and SEQ ID NO:299 was highly heterogeneous, with DNA methylation read counts varying from 0-5 MspJI/LPnPI read counts across the genomic region, as illustrated in FIG. 3. Due to the relatively high MspJI/LPnPI read counts overlapping SEQ ID NO:299, a region of 530 bp and represented by SEQ ID NO:294 was selected as the genomic region for TALEN induced genome modification.

[0139] As detailed in Example 1, the region within the selected haplotype window was analyzed for sequence redundancy, with total redundancy scores across the genomic region determined. To calculate the redundancy scores, the haplotype region was binned using an 18 nucleotide k-mer window, and for each k-mer the redundancy score was calculated. The total redundancy score for the target region was then calculated from the individual k-mer redundancy scores, as described in Example 1. The total redundancy score for SEQ ID NO:130 was 28, marginally below the preferred cut-off value of 30. Upon visual inspection of the entire length of the 530 bp region represented by SEQ ID NO:294, this region had a total redundancy score that was ≤8, a value much lower than the cut-off value of 30. The position of the genomic sequences corresponding to SEQ ID NO:130, SEQ ID NO:299, and SEQ ID NO:294 relative to the redundancy score is illustrated in FIG. 2, of the genomic regions.

[0140] The final step of the TALEN site selection process was to repeat the redundancy score analysis to identify sequence of at least 200 bp, and that had a total redundancy score of less than 10. This step was added to ensure high TALEN nuclease specificity at the selected target site.

[0141] For the entire genomic sequence of corn LH244 germplasm in the haplotype window on chromosome 1 described above, the process to select multiple TALEN target sites was completed largely as described above. This TALEN site selection process identified 61 separate TALEN target sites, represented in 17 genomic sequences (SEQ ID NO:123-139). For each of the 17 genomic sequences, there were from one to six separate specific TALEN targeting sites. A TALEN target site included a 5′-TALEN binding site, a spacer sequence, and a 3′TALEN binding site. Each of the TALEN binding sites were 15 to 24 bp long, and the spacer sequence was 18 to 25 bp long. Within the spacer sequence is the site of the DSB induced by the TALEN, and the site of incorporation of indels or incorporation of a DNA of interest by either NHRJ or HR. The SEQ ID NOs for the 5′-TALEN binding site and 3′-TALEN binding site corresponding to each of the 61 TALEN target sites are represented in Table 1.

TABLE 1
TALEN activity measured by DNA integration at
individual LH244 TALEN target sites.

| Genomic | 5′ TALEN | 3′ TALEN | TALEN activity |
|---|---|---|---|
| region | binding site | binding site | for DNA integration |
| SEQ ID NO: | SEQ ID NO: | SEQ ID NO: | (active/not active) |
| 123 | 5 | 64 | active |
| 123 | 6 | 65 | active |
| 123 | 7 | 66 | active |
| 123 | 8 | 67 | active |
| 124 | 9 | 68 | not active |
| 124 | 10 | 69 | not active |
| 124 | 11 | 70 | active |
| 124 | 12 | 71 | active |
| 125 | 13 | 72 | active |
| 125 | 14 | 73 | active |
| 125 | 15 | 74 | active |
| 126 | 16 | 75 | active |
| 126 | 17 | 76 | active |
| 126 | 18 | 77 | active |
| 126 | 19 | 78 | active |
| 127 | 20 | 79 | not active |
| 127 | 21 | 80 | active |
| 127 | 22 | 81 | active |
| 127 | 23 | 82 | not active |
| 128 | 24 | 83 | active |
| 128 | 25 | 84 | active |
| 128 | 26 | 85 | active |
| 128 | 27 | 86 | active |
| 129 | 28 | 87 | active |
| 129 | 29 | 88 | not active |
| 129 | 30 | 89 | not active |
| 129 | 31 | 90 | active |
| 130 | 32 | 91 | active |
| 130; 299 | 33 | 92 | active |
| 130; 299 | 34 | 93 | active |
| 130; 299; 294 | 35 | 94 | active |
| 131 | 295 | 296 | not active |
| 131 | 297 | 298 | not active |
| 131 | 36 | 95 | active |
| 131 | 37 | 96 | active |
| 131 | 38 | 97 | not active |
| 131 | 39 | 98 | active |
| 132 | 40 | 99 | not active |
| 132 | 41 | 100 | active |
| 132 | 42 | 101 | active |
| 132 | 43 | 102 | active |
| 133 | 44 | 103 | active |
| 133 | 45 | 104 | not active |
| 133 | 46 | 105 | not active |
| 134 | 47 | 106 | not active |
| 134 | 48 | 107 | not active |
| 134 | 49 | 108 | active |
| 135 | 50 | 109 | active |
| 136 | 51 | 110 | active |
| 136 | 52 | 111 | active |
| 136 | 53 | 112 | not active |
| 136 | 54 | 113 | not active |
| 137 | 55 | 114 | active |
| 137 | 56 | 115 | active |
| 137 | 57 | 116 | active |
| 138 | 58 | 117 | active |
| 138 | 59 | 118 | active |
| 138 | 60 | 119 | not active |
| 138 | 61 | 120 | not active |
| 139 | 62 | 121 | not active |
| 139 | 63 | 122 | active |

[0142] To assess TALEN activity at each of these TALEN target sites, a TALEN was engineered to bind at each of the 5′- and 3′-TALEN binding sites. For example, within the genomic region corresponding to SEQ ID NO:130, four TALEN target sites were tested having TALEN binding sites: (1) SEQ ID NO:32 and SEQ ID NO:91; (2) SEQ ID NO:33 and SEQ ID NO:92; (3) SEQ ID NO:34 and SEQ ID NO:93; and (4) SEQ ID NO:35 and SEQ ID NO:94. Within the genomic region corresponding to SEQ ID NO:299, three TALEN target sites were tested having TALEN binding sites: (1) SEQ ID NO:33 and SEQ ID NO:92; (2) SEQ ID NO:34 and SEQ ID NO:94; and (3) SEQ ID NO:35 and SEQ ID NO:94. Within the genomic region corresponding to SEQ ID NO:294, a single TALEN target site was tested having TALEN binding sites SEQ ID NO:35 and SEQ ID NO:94. The assay used to evaluate TALEN activity was integration of a blunt-end, double-stranded DNA (dsDNA) fragment into the DSB created by the TALEN pair at the specific target sites. Individual expression vectors were generated to contain an expression cassette for each TALEN of the TALEN pair to be evaluated. Two expression vectors (one each for the 5′- and 3′-TALEN binding site) were introduced into isolated corn leaf protoplasts essentially as described in patent application publication WO2015131101, with minor modifications. Briefly, complementary ssDNA oligonucleotides (SEQ ID NO:1 and SEQ ID NO:2) were pre-annealed to form a blunt-end, double-stranded DNA (dsDNA) fragment. Transformations of isolated corn leaf protoplasts were performed using standard PEG-protocol, with 50 pmoles of the dsDNA fragment, and two expression vectors (0.1 pmole each), one for each TALEN of the TALEN pair. Protoplast samples transformed in the presence of the dsDNA fragment alone, or with TALEN plasmids lacking dsDNA fragment, were used as negative controls. The experimental groups contained both TALEN pairs for the specific TALEN target site and the dsDNA fragment. The corn protoplasts were harvested 48 hour after transformation, and the genomic DNA was assayed for integration of the dsDNA fragment. Integration of the dsDNA fragment into the genomic DNA was detected using droplet digital PCR (ddPCR) (Bio-Rad Laboratories, Hercules, Calif.), or by standard PCR and agarose gel electrophoresis to assess PCR amplicons. The dsDNA fragment may have integrated in either a 5′ or 3′ orientation with respect to the 5′- and 3′-ends of the DSB. Therefore, at least two PCR primer sets were run for each TALEN target site where the primer sets contained a primer specific to the dsDNA fragment (SEQ ID NO:3), and a primer specific to either the 5′ side or the 3′ side of the DSB. For the ddPCR, a TaqMan® probe (SEQ ID NO:4) was included in the PCR reaction mixture. Transformation efficiency of protoplasts was calculated using a control plasmid expressing green fluorescent protein using the method described in patent application publication WO2015131101. TALEN pairs that showed statistically significant integration of targeted dsDNA fragments were identified as active (see Table 1).

[0143] Selection of TALEN target sites that did not overlap DNA methylation regions significantly improved integration of dsDNA fragments into the corn protoplast genome. A comparison of relative DNA methylation region at four separate TALEN target sites and the corresponding percent integration for each of the four TALEN target sites determined in the protoplast assay is shown in FIG. 4. For this comparison, two of the four TALEN target sites, within genomic region SEQ ID NO:130, contain the TALEN binding pairs: SEQ ID NO:34 and SEQ ID NO:93; and SEQ ID NO:35 and SEQ ID NO:94; and two of the four TALEN target sites, within genomic region SEQ ID NO:131, contain the TALEN binding pairs: SEQ ID NO:295 and SEQ ID NO:296; and SEQ ID NO:297 and SEQ ID NO:298. The percent integration of the dsDNA fragment into the TALEN target site for the test samples with either TALEN binding pair SEQ ID NO:34 and SEQ ID NO:93 (approximately 7%) or SEQ ID NO:35 and SEQ ID NO:94 (approximately 16%) was significantly higher than the controls for these sites. In contrast, the percent integration of the dsDNA fragment into the TALEN target site for the test samples with either TALEN binding pair SEQ ID NO:295 and SEQ ID NO:296 (approximately 2%) or SEQ ID NO:297 and SEQ ID NO:298 (approximately 0%) was not significantly different than the controls for these sites (FIG. 4). The DNA methylation for each of these specific TALEN target sites is presented in FIG. 4. The two TALEN target sites with TALEN binding pair SEQ ID NO:34 and SEQ ID NO:93 or TALEN binding pair SEQ ID NO:35 and SEQ ID NO:94 are located in relatively unmethylated regions. The two TALEN target sites with TALEN binding pair SEQ ID NO:295 and SEQ ID NO:296 or TALEN binding pair SEQ ID NO:297 and SEQ ID NO:298 are located in methylated regions (FIG. 4). These data illustrate that selecting TALEN target sites within genomic regions lacking DNA methylation increases the integration frequency of dsDNA into the TALEN target site.

### Example 4: TALEN Target Site Selection in Soy

[0144] The genomic sequence of Glycine max (germplasm A3555) was screened as detailed in Example 1 to identify optimal sites for genome modification, specifically to select TALEN target sites. From this analysis, 14 genomic regions were identified to contain TALEN target sites. For each genomic region, there were from one to 5 individual TALEN target sites identified for a total of 39 TALEN target sites (see Table 2). For each TALEN target site, the SEQ ID NO: corresponding each 5′- and 3′-TALEN binding site is presented in Table 2.

[0145] As one representative example of the target site selection process in soy, a genomic region on soy chromosome 2 (CR02), represented by SEQ ID NO:257, was chosen initially as being within a favorable haplotype window associated with a transgene insertion event with a positive agronomic trait for insect resistance. Although this genomic region was intergenic, after additional analysis no specific site was identified as a TALEN target site that met all of the selection criteria detailed in Example 1. Therefore, the region was reanalyzed with relaxed criteria for redundancy score and DNA methylation profile to select a TALEN target site.

[0146] Redundancy scores for the selected genomic region were calculated as detailed in Example 1 using an 18 bp k-mer scanning window. The resulting k-mer redundancy scores were mapped to the haplotype window, and their distribution was scanned to identify genomic regions of at least 1 Kb long that had a total redundancy score of ≤30%. No region of SEQ ID NO:257 met this selection criteria (FIG. 5). Therefore, the region was reanalyzed, and the preference for a 1 Kb region was relaxed to identify regions of at least 100 bp that had a total redundancy score of ≤30%. Within the heterogeneous 9.6 kb region, several 100 bp stretches with total redundancy scores ≤30% were interspersed between peaks of high sequence redundancy. These short, low redundancy sections formed the population from which TALEN target sites were selected.

[0147] The low redundancy stretches were further analyzed to identify regions that lacked DNA methylation. DNA methylation was determined for the soy genome essentially as described in Example 3, and DNA methylation reads were mapped across the 9.6 kb region of SEQ ID NO:257. Similar to the total redundancy scores, the DNA methylation reads were heterogeneously distributed across the region (FIG. 5). Mapping the DNA methylation profiles across the population of short, low redundancy regions identified a 1 kb region (FIG. 6, SEQ ID NO:554) with one or more 150 bp regions meeting the relaxed criteria for redundancy and DNA methylation. Three TALEN target sites within SEQ ID NO:554 were selected, corresponding to 5′- and 3′-TALEN binding sites (a) SEQ ID NO:233 and SEQ ID NO:234; (b) SEQ ID NO:235 and SEQ ID NO:236; and (c) SEQ ID NO:237 and SEQ ID NO:238 (Table 2); with the relative position of all three TALEN binding sites illustrated by the thick horizontal line in FIG. 6.

[0148] For each of the TALEN target sites identified, TALEN pairs were engineered and TALEN activity was determined as described in Example 3, except using soy protoplasts for the assay. TALEN activity for each of the TALEN target sites assessed with the soy protoplast assay was determined by ddPCR, or by standard PCR with amplicon analysis by agarose gel electrophoresis (Table 2). In Table 2, if either ddPCR or the standard PCR was positive, then the TALEN activity was scored as active. If both assay results were negative for a particular TALEN target site, then the TALEN activity was scored as not active.

TABLE 2
TALEN activity measured by DNA integration at
individual soy TALEN target sites.

| Genomic | 5′ TALEN | 3′ TALEN binding | TALEN activity |
|---|---|---|---|
| region | binding site | site | for DNA integration |
| SEQ ID NO: | SEQ ID NO: | SEQ ID NO: | (active/not active) |
| 251 | 173 | 174 | active |
| 251 | 175 | 176 | active |
| 251 | 177 | 178 | active |
| 251 | 179 | 180 | not active |
| 252 | 181 | 182 | active |
| 252 | 183 | 184 | not active |
| 252 | 185 | 186 | not active |
| 252 | 187 | 188 | active |
| 252 | 189 | 190 | not active |
| 253 | 191 | 192 | active |
| 253 | 193 | 194 | not active |
| 253 | 195 | 196 | not active |
| 260 | 197 | 198 | active |
| 260 | 199 | 200 | not active |
| 260 | 201 | 202 | active |
| 262 | 203 | 204 | not active |
| 262 | 205 | 206 | not active |
| 262 | 207 | 208 | not active |
| 266 | 209 | 210 | active |
| 274 | 211 | 212 | not active |
| 274 | 213 | 214 | active |
| 275 | 215 | 216 | active |
| 275 | 217 | 218 | active |
| 281 | 219 | 220 | active |
| 255 | 221 | 222 | active |
| 255 | 223 | 224 | active |
| 255 | 225 | 226 | active |
| 256 | 227 | 228 | active |
| 256 | 229 | 230 | active |
| 256 | 231 | 232 | active |
| 257 | 233 | 234 | active |
| 257 | 235 | 236 | active |
| 257 | 237 | 238 | active |
| 258 | 239 | 240 | active |
| 258 | 241 | 242 | active |
| 258 | 243 | 244 | active |
| 259 | 245 | 246 | not active |
| 259 | 247 | 248 | active |
| 259 | 249 | 250 | active |

[0149] To further confirm the TALEN activity, a subset of the protoplast assay samples were reevaluated for successful integration of the dsDNA fragment into TALEN target sites by standard PCR using multiple primer sets (Table 3). For each PCR primer set, one primer was to sequence flanking the DSB of the TALEN target site, and one primer (SEQ ID NO:3) was specific to the dsDNA fragment integrated into the DSB. The PCR amplicons were separated using standard agarose gel electrophoresis, and the size of each amplicon was confirmed by comparison to a molecular weight marker. DNA samples from protoplast assay negative controls lacked PCR amplicons. A band of the expected size was detected for all three TALEN target sites for SEQ ID NO:257 (Sample #10, 11, and 12, Table 3). Of the 21 samples retested using standard PCR, TALEN activity was consistent between the two assays, standard PCR and ddPCR. These data indicate the utility in the selection process to identify target sites for genome modification in soy.

TABLE 3
PCR confirmation of site directed integration of dsDNA at
TALEN target sites in the soy genome.

| | 5′/3′ TALEN | | Size (bp) of | Expected band |
|---|---|---|---|---|
| | binding site | Primer pair | Expected | Amplified |
| Sample # | SEQ ID NO: | SEQ ID NO: | band | Yes or No |
| 1 | 199/200 | 290/3 | 750 | No |
| 2 | 211/212 | 292/3 | 1100 | No |
| 3 | 191/192 | 289/3 | 500 | Yes |
| 4 | 221/222 | 283/3 | 450 | Yes |
| 5 | 223/224 | 283/3 | 400 | Yes |
| 6 | 225/226 | 283/3 | 500 | Yes |
| 7 | 227/228 | 284/3 | 400 | Yes |
| 8 | 229/230 | 284/3 | 200 | Yes |
| 9 | 231/232 | 284/3 | 330 | Yes |
| 10 | 233/234 | 285/3 | 300 | Yes |
| 11 | 235/236 | 285/3 | 270 | Yes |
| 12 | 237/238 | 285/3 | 220 | Yes |
| 13 | 239/240 | 286/3 | 550 | Yes |
| 14 | 241/242 | 286/3 | 460 | Yes |
| 15 | 243/244 | 286/3 | 460 | Yes |
| 16 | 245/246 | 287/3 | 700 | No |
| 17 | 247/248 | 287/3 | 650 | Yes |
| 18 | 249/250 | 287/3 | 550 | Yes |
| 19 | 209/210 | 291/3 | 400 | Yes |
| 20 | 197/198 | 290/3 | 500 | No |
| 21 | 185/186 | 288/3 | 780 | No |

### Example 5: Analysis of Site Selection Methods

[0150] To evaluate the target site selection process, a population of R0 transgenic corn events containing a transgene conferring herbicide tolerance were selected, and the genomic site of the randomly integrated transgene was determined using standard molecular biology and sequencing methods. Only the events with the transgene localized to intergenic regions were selected for the analysis. Additionally, the R0 events received application of herbicide in a greenhouse and were evaluated for herbicide tolerance as measured by the percentage of injury after herbicide application. Only the events with R0 injury scores within the range from 5 (low) to 30 (high) were included in the analysis. The size of the selected R0 population was 319 events. In this analysis, the integration coordinates of the randomly generated events were mapped, and these coordinates were evaluated to identify the number of events which would have been selected by the of site selection process as detailed in Example 1. Through this evaluation, the genomic location of randomly integrated transgene cassette identified 57 events which were within loci which would have been selected by the site selection process as described in Example 1.

[0151] A separate subset of randomly generated events were fertilized to set seed (inbred/hybrid) and the R1 were evaluated for herbicide tolerance in field trials. Analysis was completed for 24 randomly generated events that passed the R0 herbicide tolerance test but failed the field test. R1 plants from 24 events failed the field test with herbicide injury scores of ≥30. Review of the 24 genomic integration sites of the R1 events that failed the field trial indicated that none of the sties of transgene integration met the criteria for target site selection detailed in Example 1. This analysis indicates the effectiveness of the target site selection process to identify genomic sequences for site-specific transgene integration that are optimal for agronomic performance of the transgenic trait.

### Example 6: Target Site Selection for Corn B Chromosome Sequence

[0152] The target site selection process essentially as detailed in Example 1 was repeated on a unique assembly of corn B chromosome sequence. The site selection criteria applied during the analysis included analysis of genic/intergenic regions, sequence redundancy, repeat analysis, DNA methhylation profile, and sRNA hotspot determination. From this analysis, 252 sequences (SEQ ID NO:300-551) were identified as potential loci for genome modification.

### Example 7: Validating TALEN Activity Via Transgene Integration into Target Sites in Corn

[0153] Nine genomic regions from the LH244 corn germplasm were selected for further testing of site specific genome modification by TALENs. Specifically, TALENs were engineered to introduce DSBs at loci within these sites to facilitate site-specific integration of a transgene cassette. The selected genomic regions are represented by SEQ IDs 123, 124, 127, 128, 132, 133, 137, 138 and 139. For each region, one TALEN target site was selected for testing TALEN activity. A TALEN target site included a 5′-TALEN binding site, a spacer sequence, and a 3′TALEN binding site. Each of the TALEN binding sites were 15 to 24 bp long, and the spacer sequence was 18 to 25 bp long. Within the spacer sequence is the site of the DSB induced by the TALEN, and the site of incorporation of the transgene cassette. The SEQ ID NOs for the 5′-TALEN binding site and 3′-TALEN binding site corresponding to each of the nine TALEN target sites are represented in Table 4. An expression cassette encoding CP4-EPSPS, which confers tolerance to the herbicide glyphosate, was chosen as the transgene for site-specific integration at the selected loci. The CP4-EPSPS transgene was flanked by homology arms (HA) to promote HR-mediated integration.

[0154] Individual T-DNA vectors comprising the transgene and TALEN pairs were generated for each locus. Each vector comprised two right borders (RBs) that flanked three expression cassettes: an expression cassette encoding the gene (CP4-EPSPS) positioned between a left homology arm and a right homology arm; and two expression cassettes each encoding half of a TALEN pair created for a specific target site. TALENs were obtained from Life Technologies.

[0155] Approximately 3,800 to 6,800 immature corn embryos were co-cultured with Agrobacterium containing the vectors for 3 days, then moved to callus-induction medium containing 0.1 mM glyphosate as a selection agent. Approximately 30 to 250 regenerated plants were selected for each construct, transferred to plugs, and grown in a greenhouse.

[0156] To confirm TALEN-mediated site-directed integration, genomic DNA was isolated from selected R0 plants and flank PCR assays were carried out to identify individual plants comprising CP4-EPSPS cassette insertions at the TALEN target sites. PCR primers were designed such that a product was only produced when the CP4-EPSPS cassette inserted into the selected target region of the corn genome. One PCR primer was designed to bind to genomic DNA flanking the targeted region, and one PCR primer was designed to bind to a sequence within the CP4-EPSPS cassette. Two sets of PCR primers were used, one positioned on the 5′ end of the CP4-EPSPS cassette and one positioned on the 3′ end of the CP4-EPSPS cassette. Following PCR, the PCR products were resolved on agarose gels to identify plants with the correct sized bands for both the 5′ end (5′ flank) and the 3′ end (3′ flank) of the CP4-EPSPS cassette. As tabulated in Table 4, TALEN activity and transgene insertion was observed in target loci 128, 133, 137, 138 and 139. This confirms that among the preselected corn genomic loci, several can be targeted for precise in planta genome modifications including transgene integration.

TABLE 4
TALEN activity measured by transgene integration at
individual LH244 TALEN target sites.

| Genomic | | 3′ TALEN | | # of |
|---|---|---|---|---|
| region | 5′ TALEN | binding site | | events positive |
| SEQ ID | binding site | SEQ ID | # of events | for Flank PCR |
| NO: | SEQ ID NO: | NO: | tested | (5′ or 3′ Flank) |
| 123 | 8 | 67 | 34 | 0 |
| 124 | 12 | 71 | 28 | 0 |
| 127 | 21 | 80 | 138 | 0 |
| 128 | 27 | 86 | 120 | 7 |
| 132 | 42 | 101 | 255 | 0 |
| 133 | 44 | 103 | 80 | 6 |
| 137 | 56 | 115 | 90 | 6 |
| 138 | 59 | 118 | 59 | 16 |
| 139 | 63 | 122 | 169 | 3 |

### Example 8: CRISPR-Cas9 Target Selection and Site-Specific DNA Integration in Corn Protoplasts

[0157] After confirming that TALENs can be successfully used to introduce site specific modifications in selected genomic loci in protoplasts (Example 3), a similar assay was carried out to test for CRISPR-Cas9 mediated genome modifications at a pre-selected locus. A genomic sequence of 3.5 kb (SEQ ID NO:130) was chosen as a region to identify a target site, with the 1.6 kb sequence (SEQ ID NO:299) selected as the optimal region, thus avoiding the endogenous gene plus 2 kb buffer (Zm.B73 CR01 coordinates 287444 kb to 287445.9 kb), as illustrated in FIG. 2 and described in Example 3. This sequence was further analyzed and an optimal Cas9 guide RNA target site (SEQ ID NO:555) with a 3′ TGG PAM sequence was identified. A portion of the optimal region (SEQ ID NO:299) comprising sequences flanking the target site (SEQ ID NO:555) and TGG PAM sequence is also disclosed here as SEQ ID NO:556.

[0158] The assay used to evaluate CRISPR-Cas9 activity was integration of a blunt-end, double-stranded DNA (dsDNA) donor into the DSB created by the Cas9 nuclease at the specific target site. The CRISPR/Cas9 nuclease from Streptococcus pyogenes was chosen as the nuclease system. Two expression vectors were generated. One comprised an expression cassette for the Cas 9 nuclease and the other comprised an expression cassette for the single-guide RNA designed to target SEQ ID NO:555. The expression vectors were introduced into isolated corn leaf protoplasts essentially as described in Example 3 and in patent application publication WO2015131101, with minor modifications. Briefly, complementary ssDNA oligonucleotides (SEQ ID NO:1 and SEQ ID NO:2) were pre-annealed to form a blunt-end, double-stranded DNA (dsDNA) donor. Transformations of isolated corn leaf protoplasts were performed using standard PEG-protocol, with 50 pmoles of the dsDNA fragment, and the two expression vectors (0.1 pmole each) (Table 5, Test). Protoplast samples transformed in the presence of the dsDNA donor and the Cas9 plasmid but lacking the guide RNA plasmid; or transformed with the dsDNA fragment and the guide RNA plasmid but lacking the Cas9 plasmid were used as negative controls (Table 5, Control 1 and Control 2). The corn protoplasts were harvested 48 hours after transformation, and the genomic DNA was assayed for integration of the dsDNA donor. Integration of the dsDNA donor into the genomic DNA was detected by standard PCR and agarose gel electrophoresis to assess PCR amplicons. The dsDNA donor may be integrated in either a 5′ or 3′ orientation with respect to the 5′- and 3′-ends of the DSB. Therefore, at least two PCR primer sets were run for the target site where the primer sets contained a primer specific to the dsDNA donor (SEQ ID NO:3), and a primer specific to either the 5′ side or the 3′ side of the DSB. Transformation efficiency of protoplasts was calculated using a control plasmid expressing green fluorescent protein using the method described in patent application publication WO2015131101.

[0159] PCR amplicons were separated using standard agarose gel electrophoresis, and the size of each amplicon was confirmed by comparison to a molecular weight marker. As shown in Table 5, a band of the expected size was detected in protoplasts expressing the Cas9, guide RNA and the dsDNA donor (Test) indicating site-directed integration of donor dsDNA at the target site following Cas9-mediated genomic DNA cleavage. DNA samples from protoplasts transformed with the negative controls lacked PCR amplicons (Control 1 and Control 2). To further confirm dsDNA donor integration, the gel-separated PCR amplicons from the Test samples were isolated, cloned via Zero blunt end Topo cloning (Life technologies) and sequenced. Sequence analysis of the target-donor junctions identified two independent integration events. Both events resulted from NHEJ-mediated donor dsDNA integration at the expected Cas9 cleavage site within the targeted genomic region. The results presented here demonstrate that the selected genomic locus is amenable to CRISPR-Cas9 mediated cleavage and site-specific integration of a donor dsDNA construct.

TABLE 5
Cas9 activity measured by DNA integration at
a specific target site in LH244 protoplasts.

| | Genomic | Target | | | | Expected |
|---|---|---|---|---|---|---|
| | region | site | | | Donor | band |
| | selected for | SEQ ID | Cas 9 | sg | oligonu- | amplified |
| Assay | targeting | NO: | Nuclease | RNA | cleotide | (Yes/No) |
| Test | SEQ ID 130; | SEQ ID | + | + | + | Yes |
| | 299 | 555 | | | | |
| Control- | SEQ ID 130; | SEQ ID | + | − | + | No |
| 1 | 299 | 555 | | | | |
| Control- | SEQ ID 130; | SEQ ID | − | + | + | No |
| 2 | 299 | 555 | | | | |

### Example 9: CRISPR-Cas9 Mediated Site-Specific DNA Integration at a Selected Target Site in Corn Embryos

[0160] After confirming that CRISPR-Cas9 could be successfully used to introduce site specific modifications in a selected genomic locus in a protoplast assay system, a similar assay was carried out in corn immature embryos. As described in Example 6, an optimal Cas9 gRNA target site (SEQ ID NO:555) was identified within a selected genomic locus (SEQ ID NOs:130 and 299).

[0161] The assay used to evaluate CRISPR-Cas9 activity was integration of a blunt-end, double-stranded DNA (dsDNA) donor oligo into the DSB created by the Cas9 nuclease at the selected target site. The CRISPR/Cas9 nuclease from Streptococcus pyogenes was expressed in E. coli and purified. The complementary ssDNA oligonucleotides (SEQ ID NO:1 and SEQ ID NO:2) were pre-annealed to form a blunt-end, double-stranded DNA (dsDNA) donor. The purified Cas9 protein, in-vitro synthesized guide RNA and the dsDNA donor were co-delivered into LH244 immature corn embryos via biolistics. Genomic DNA was extracted from the bombarded embryos after 48 hours and assayed for integration of the dsDNA donor. DNA extracted from untransformed embryos was used as a control.

[0162] As described in Example 8, integration of the dsDNA donor into the genomic DNA was detected by standard PCR and agarose gel electrophoresis to assess PCR amplicons. The dsDNA donor may be integrated in either a 5′ or 3′ orientation with respect to the 5′- and 3′-ends of the DSB. Therefore, at least two PCR primer sets were run for the target site where the primer sets contained a primer specific to the dsDNA donor (SEQ ID NO:3), and a primer specific to either the 5′ side or the 3′ side of the DSB. PCR amplicons were separated using standard agarose gel electrophoresis, and the size of each amplicon was confirmed by comparison to a molecular weight marker.

[0163] As shown in Table 6, a band of the expected size was detected in samples prepared from embryos bombarded with the Cas9, the guide RNA, and the dsDNA donor indicating site-directed integration of donor dsDNA at the target site following Cas9 mediated genomic DNA cleavage (Table 6, Test). No PCR product was detected in samples from untransformed tissue (Table 6, Control). To further confirm donor oligo integration, the gel-separated PCR amplicons were isolated, cloned via Zero blunt end Topo cloning (Life technologies) and sequenced. Sequence analysis of the target-donor junctions identified one independent integration event. This event resulted from NHEJ-mediated donor dsDNA integration at the expected Cas9 cleavage site within the targeted genomic region. The results presented here demonstrate that the selected genomic locus is amenable to CRISPR-Cas9 mediated cleavage and site-specific integration of a donor dsDNA construct in corn embryogenic tissue. Taken together, results from Example 3, Example 7, Example 8 and Example 9 demonstrate that a locus selected according to criteria described in Example 1 can be precisely and reproducibly modified by multiple sequence specific endo-nucleases in multiple cell types for integration of donor DNA.

TABLE 6
Cas9 activity measured by DNA integration at a specific
target site in LH244 embryogenic tissue.

| | Genomic | | | | | Expected |
|---|---|---|---|---|---|---|
| | region | | | | Donor | band |
| | selected for | Target | | sg | oligonu- | amplified |
| Assay | targeting | site | Nuclease | RNA | cleotide | (Yes/No) |
| Test | SEQ ID 130; | SEQ ID | + | + | + | Yes |
| | 299 | 555 | | | | |
| Control | SEQ ID 130; | SEQ ID | − | − | − | No |
| | 299 | 555 | | | | |

The application's sequence listing, which the Patent Office published only in electronic form, follows.

SEQUENCE LISTING (556 sequences)

SEQ ID NO: 1 - DNA, 90 bp, Artificial Sequence
  synthetic oligonucleotide
ttaagggataacagggtaatatagcgtaactataacggtcctaaggtagcgaattacgatacaaggctacctagcttcgcagttacgcta

SEQ ID NO: 2 - DNA, 90 bp, Artificial Sequence
  synthetic oligonucleotide
tagcgtaactgcgaagctaggtagccttgtatcgtaattcgctaccttaggaccgttatagttacgctatattaccctgttatcccttaa

SEQ ID NO: 3 - DNA, 25 bp, Artificial Sequence
  synthetic oligonucleotide
ccttgtatcgtaattcgctacctta

SEQ ID NO: 4 - DNA, 20 bp, Artificial Sequence
  synthetic oligonucleotide
ctatattaccctgttatccc

SEQ ID NO: 5 - DNA, 25 bp, Zea mays
tatgcttgaggacaattccctgtgt

SEQ ID NO: 6 - DNA, 19 bp, Zea mays
tgaggacaattccctgtgt

SEQ ID NO: 7 - DNA, 19 bp, Zea mays
tttctgctttctagattcc

SEQ ID NO: 8 - DNA, 19 bp, Zea mays
ttcataatccccttcaaac

SEQ ID NO: 9 - DNA, 25 bp, Zea mays
tatgctgccaacaatgatatattct

SEQ ID NO: 10 - DNA, 19 bp, Zea mays
ttagtgacctcttagttaa

SEQ ID NO: 11 - DNA, 19 bp, Zea mays
ttcacccttaatttagttt

SEQ ID NO: 12 - DNA, 19 bp, Zea mays
tagatagctacccaattaa

SEQ ID NO: 13 - DNA, 19 bp, Zea mays
tgtttgttccttgaacgag

SEQ ID NO: 14 - DNA, 19 bp, Zea mays
tctgcatgagcatgttagg

SEQ ID NO: 15 - DNA, 25 bp, Zea mays
tcactgaattccgatatgtttgttc

SEQ ID NO: 16 - DNA, 19 bp, Zea mays
tgttccttattacaaacac

SEQ ID NO: 17 - DNA, 25 bp, Zea mays
taacaacactaatttatcatgacaa

SEQ ID NO: 18 - DNA, 19 bp, Zea mays
ttggccatacatgatataa

SEQ ID NO: 19 - DNA, 25 bp, Zea mays
tctcaagagcctcgccaaagttttg

SEQ ID NO: 20 - DNA, 19 bp, Zea mays
tcagcacacgcatgtttaa

SEQ ID NO: 21 - DNA, 25 bp, Zea mays
tctcagacgtcgacagcatgcatat

SEQ ID NO: 22 - DNA, 19 bp, Zea mays
tagacgacgacaactgcat

SEQ ID NO: 23 - DNA, 25 bp, Zea mays
tcactcgcggctaataattacatcc

SEQ ID NO: 24 - DNA, 19 bp, Zea mays
ttgtgcctcacaagaagat

SEQ ID NO: 25 - DNA, 19 bp, Zea mays
tcaaccaaatgccatatat

SEQ ID NO: 26 - DNA, 25 bp, Zea mays
tgtggaactttctatctcttgttct

SEQ ID NO: 27 - DNA, 19 bp, Zea mays
tctgccacccttttagcta

SEQ ID NO: 28 - DNA, 20 bp, Zea mays
tgtgccgaaggtggtcttgt

SEQ ID NO: 29 - DNA, 19 bp, Zea mays
tgtagttcaatatgatcac

SEQ ID NO: 30 - DNA, 19 bp, Zea mays
tggatgaaacactatcact

SEQ ID NO: 31 - DNA, 19 bp, Zea mays
tagaccaattcataggata

SEQ ID NO: 32 - DNA, 19 bp, Zea mays
tggttgtttcttgtaattt

SEQ ID NO: 33 - DNA, 19 bp, Zea mays
tcaagtaccgtttggcata

SEQ ID NO: 34 - DNA, 19 bp, Zea mays
tcgtgtgactgctcccaaa

SEQ ID NO: 35 - DNA, 19 bp, Zea mays
tctcctatcataacgtttg

SEQ ID NO: 36 - DNA, 19 bp, Zea mays
tggtccaagcttgcacttt

SEQ ID NO: 37 - DNA, 19 bp, Zea mays
tgatggttttcttccaacc

SEQ ID NO: 38 - DNA, 19 bp, Zea mays
tcccccaccataccttaga

SEQ ID NO: 39 - DNA, 19 bp, Zea mays
tactgcctcccccaccata

SEQ ID NO: 40 - DNA, 19 bp, Zea mays
tgaagtcccaagcgttttt

SEQ ID NO: 41 - DNA, 25 bp, Zea mays
tctcgccaaatcccggtgatgagcg

SEQ ID NO: 42 - DNA, 25 bp, Zea mays
tcacgtgcgctttgcatttttagag

SEQ ID NO: 43 - DNA, 19 bp, Zea mays
tccactctagagtagagtt

SEQ ID NO: 44 - DNA, 19 bp, Zea mays
tctaaaaataacaagcaaa

SEQ ID NO: 45 - DNA, 19 bp, Zea mays
tcttttatatttttctcag

SEQ ID NO: 46 - DNA, 19 bp, Zea mays
tctaactaacaaaataagt

SEQ ID NO: 47 - DNA, 19 bp, Zea mays
tgttggtaaacagtattga

SEQ ID NO: 48 - DNA, 19 bp, Zea mays
tgttggtaaacagtattga

SEQ ID NO: 49 - DNA, 19 bp, Zea mays
tgagtgttggtaaacagta

SEQ ID NO: 50 - DNA, 19 bp, Zea mays
tgttataagtacattatta

SEQ ID NO: 51 - DNA, 19 bp, Zea mays
tcaatgagacaatgacaac

SEQ ID NO: 52 - DNA, 19 bp, Zea mays
ttgcaggttcttgaatgtt

SEQ ID NO: 53 - DNA, 19 bp, Zea mays
tgttctaagtacaaataaa

SEQ ID NO: 54 - DNA, 19 bp, Zea mays
tctgttggcaataattagg

SEQ ID NO: 55 - DNA, 19 bp, Zea mays
tctcgaaagccctcttgat

SEQ ID NO: 56 - DNA, 19 bp, Zea mays
tgggaaattggtaaggttg

SEQ ID NO: 57 - DNA, 19 bp, Zea mays
tacaagctttagccctaat

SEQ ID NO: 58 - DNA, 19 bp, Zea mays
tccgcttgtttaaagctaa

SEQ ID NO: 59 - DNA, 19 bp, Zea mays
tgataaggcgatagatgct

SEQ ID NO: 60 - DNA, 19 bp, Zea mays
tgctccaggattctcattc

SEQ ID NO: 61 - DNA, 19 bp, Zea mays
tgcttagatggcaaacatg

SEQ ID NO: 62 - DNA, 19 bp, Zea mays
tcatacaattttcaaaccc

SEQ ID NO: 63 - DNA, 19 bp, Zea mays
tcccaataataagatgctt

SEQ ID NO: 64 - DNA, 25 bp, Zea mays
ttccttcaatagacaaccgaccaag

SEQ ID NO: 65 - DNA, 19 bp, Zea mays
tcaatagacaaccgaccaa

SEQ ID NO: 66 - DNA, 19 bp, Zea mays
tttgtaattggatccctcg

SEQ ID NO: 67 - DNA, 19 bp, Zea mays
tgtataaaaacagccatat

SEQ ID NO: 68 - DNA, 25 bp, Zea mays
tgcatcttttttcacttgaaccttg

SEQ ID NO: 69 - DNA, 19 bp, Zea mays
tctaactactaactatcaa

SEQ ID NO: 70 - DNA, 19 bp, Zea mays
tgtcattttcaacagcatt

SEQ ID NO: 71 - DNA, 19 bp, Zea mays
tgttggcagcatagctatt

SEQ ID NO: 72 - DNA, 19 bp, Zea mays
tctattgagctcaacacag

SEQ ID NO: 73 - DNA, 19 bp, Zea mays
tcaaggaacaaacatatcg

SEQ ID NO: 74 - DNA, 25 bp, Zea mays
tgagctcaacacagtatgtttctaa

SEQ ID NO: 75 - DNA, 19 bp, Zea mays
tttacctagagatgacaac

SEQ ID NO: 76 - DNA, 25 bp, Zea mays
tattactggagtgagcccttgccat

SEQ ID NO: 77 - DNA, 19 bp, Zea mays
tcagtaacactaattggca

SEQ ID NO: 78 - DNA, 25 bp, Zea mays
tctactttctcttgcttaaatgttg

SEQ ID NO: 79 - DNA, 19 bp, Zea mays
tctcaagatctgagccact

SEQ ID NO: 80 - DNA, 25 bp, Zea mays
tcgaattcttcgttcatatgtcttt

SEQ ID NO: 81 - DNA, 19 bp, Zea mays
tgtaattattagccgcgag

SEQ ID NO: 82 - DNA, 25 bp, Zea mays
tgtggatgaaactgaaaccaccccg

SEQ ID NO: 83 - DNA, 19 bp, Zea mays
tacgcagtaacgtgatata

SEQ ID NO: 84 - DNA, 19 bp, Zea mays
tgccaaatgcaggtagcag

SEQ ID NO: 85 - DNA, 25 bp, Zea mays
taccactacccgacaaggtgtagct

SEQ ID NO: 86 - DNA, 19 bp, Zea mays
tgcaacaaatctatatcat

SEQ ID NO: 87 - DNA, 19 bp, Zea mays
ataaggtcccagggggaaa

SEQ ID NO: 88 - DNA, 19 bp, Zea mays
tctaataatttgcattgag

SEQ ID NO: 89 - DNA, 19 bp, Zea mays
tacaacctagtaagcctaa

SEQ ID NO: 90 - DNA, 19 bp, Zea mays
tacccactattaggcatac

SEQ ID NO: 91 - DNA, 19 bp, Zea mays
tcccccctatataatagaa

SEQ ID NO: 92 - DNA, 19 bp, Zea mays
tcatgaaagataaacagtc

SEQ ID NO: 93 - DNA, 19 bp, Zea mays
tctactaaagaggtagcac

SEQ ID NO: 94 - DNA, 19 bp, Zea mays
tgagtttgagacccacctg

SEQ ID NO: 95 - DNA, 19 bp, Zea mays
tgggagtgcatggcgaaag

SEQ ID NO: 96 - DNA, 19 bp, Zea mays
tcctatgagcaaagaagat

SEQ ID NO: 97 - DNA, 19 bp, Zea mays
tctgacttggtaaatgtca

SEQ ID NO: 98 - DNA, 19 bp, Zea mays
ttggtaaatgtcatgttag

SEQ ID NO: 99 - DNA, 19 bp, Zea mays
tcaaaactaatcagcattt

SEQ ID NO: 100 - DNA, 25 bp, Zea mays
ttcaagatttacgaattccggtgat

SEQ ID NO: 101 - DNA, 25 bp, Zea mays
ttggcgagaataacatatttaccat

SEQ ID NO: 102 - DNA, 19 bp, Zea mays
tcttgacttcggagcagaa

SEQ ID NO: 103 - DNA, 19 bp, Zea mays
tgtcatactatagctgaga

SEQ ID NO: 104 - DNA, 19 bp, Zea mays
tgaaacttattttgttagt

SEQ ID NO: 105 - DNA, 19 bp, Zea mays
tctccaaatttttaattat

SEQ ID NO: 106 - DNA, 19 bp, Zea mays
tctcatcgtacccttattt

SEQ ID NO: 107 - DNA, 19 bp, Zea mays
ttctcatcgtacccttatt

SEQ ID NO: 108 - DNA, 19 bp, Zea mays
tcgtacccttatttaatat

SEQ ID NO: 109 - DNA, 19 bp, Zea mays
tgacacaaaataatttatg

SEQ ID NO: 110 - DNA, 19 bp, Zea mays
taggtctggcttgctgtaa

SEQ ID NO: 111 - DNA, 19 bp, Zea mays
tgccaacagaacctgcaac

SEQ ID NO: 112 - DNA, 19 bp, Zea mays
tcaccacctaattattgcc

SEQ ID NO: 113 - DNA, 19 bp, Zea mays
tgcttcacttagaattcca

SEQ ID NO: 114 - DNA, 25 bp, Zea mays
tgaaccgtttgcctagtcttggcta

SEQ ID NO: 115 - DNA, 19 bp, Zea mays
taacgtaattagggctaaa

SEQ ID NO: 116 - DNA, 20 bp, Zea mays
tatgcatatacgtgtgcgtc

SEQ ID NO: 117 - DNA, 19 bp, Zea mays
tgtacatgccctgaggatg

SEQ ID NO: 118 - DNA, 19 bp, Zea mays
tagctacgatacctttgga

SEQ ID NO: 119 - DNA, 19 bp, Zea mays
tgaagatgaaaaggaaata

SEQ ID NO: 120 - DNA, 19 bp, Zea mays
tgattaagcaacaacaatg

SEQ ID NO: 121 - DNA, 19 bp, Zea mays
tcgaggactaccaaagcat

SEQ ID NO: 122 - DNA, 19 bp, Zea mays
tctaagttcaatgtgaatt

SEQ ID NO: 123 - DNA, 2928 bp, Zea mays
tagtactgtcgtcggtgtcagttgcaatacaacccatgtgcagtgggacgagacggaaaaggtgtgtgcgcagcgcagtgctcaagttcagaactcagcgcttgacgctcgagtcagagagattcgggacgctctctcggtagacgactcggtgtcggtgctcagtacccaggtgatccgtgcatgggagtattcggtcgtctgcctgcttgcaagacgccatccacccacccaccggcggactaggcgtttggcgccacctccttgtagttgttggcttggttaattggacgagccgggtgctcgaaggcctgcctgcctcgtcatctttttgctgcgtcatgggaattgacccgcggtgagaccaatccaatccaatgatgcccgccgtgaccgacctcacgccagataccgcgcgtacggagtcagagctggcacagtcgcatgtgcattgacccgacgagaagaagataatcacagatggagcggacacaaagccacagcccacagcggcacagcacgcggctcaagtcagccgttagccggtggcggtacgtgtgtgtcagtgtgggcgggcggcggcgcggtacggccgggacaagcgtaagcgccgccgccgcctgcctgcctgcctgccgcacacgtcgcggagcatctagctagctagctgtgcgtctctgtcaggcagcgagtcggccccgctcgccgcgtcagatcggtggacgaggacgcgtggtgcgctggcgccgcgccgttcgtcgcctgcagcaaaagctactggtgtgggcagttgggcaccgcattcatctatcacgcaccaggttctcaaatggttcgagttgagatttaggggggtgtttggttttagagactaattgttagcccctccaatttattccactctagtcactaaattatcaaatatggaaactaaaatagtgttatagtttctatattttacaatttatagactaaagtgaaataaaatggagggactaaaaatgagtccctagtaaccaaacactaccttaggtggtgttacaaactgtttcacccgatgactgttaaaataaaaaaaaaatcacgcaaggaatagagtatcgtgtgattaaaagctcgagcttattttagaaggtgtgctcttatatgtttacaaatgttttgaactatatatgagtttctgctttctagattcccgagaagccacacatatctccgagggatccaattacaaacaaattcagtaaagatttctaaaaaatatcctagcgctttagtttcatttaagattgaggaataagcacacacattttctttccatagattcataatccccttcaaacaatttaaatctgttacacagatatatggctgtttttatacaagaaacattatatgtaaatgagtttaagaaacctctaactatgcttgaggacaattccctgtgtcttgctctagattacatgcgcttggtcggttgtctattgaaggaaagatgttttaatggctagacatgagagttatttgagccttggaggtagattggtgcttatcaactctagattgagtaatctaatggtttatgatatactccctccgtctcaggatataagacgtaatcactttttattcttgtcccacaatataagacgtgctctctctatgcatacgtatatcgatgcagtggtatagagacaattaaatgcatttttttggtctttgaaccagatgtggttacgccttatatactgggacggagggagtattcaataaaaaatgtaccattcaacttttgcagaattagataactagttcatttagatgccatgacatccaaatgaactagttgtctggttttgcaaaagttaaatgacatttatacaattaatcctttttgatatggcgatatgccttttaccttcgacatctattggaaagatggatagtgctagaaagcgttttttttggaagagggaaatatcatttgattagatggactaagatcactaaacctagctaagaaaaaaaagattaattacatacttgtcaccctgtttttataaaattagataggtaattcattttgatgtcattgagcgacatgaaaataaactactttataactctttaaatttggagtggcatacttctaattaaccccaaaccagatatatttacttaagcagcaggtctacggtgtcggccaatgaaaaatccaccatttttttggcatactagatggtgtggctataggttactttaaagacacacttttctcattttttttaaaaaaaacgaggaccgtgattgttcagttgaagccatgaaatataaaaactagagcctcatttttaggagatggctacgtgaagatttacagagtcagcttagaagattgcaagatatcgttctaaaaaataacgatggccagttggtaattgcgagtgagataaatctggaaatttccctaagaaactgttttgtatgggcaaagttttaatataatctaaaaaggcaaaacaaccgtggagtgaaggtcttcacgtggttggtattacaagatagaagataccctcttcgttttttttatttatcacgttttagtttaaaattaaactagcagatgataaatattcaagaacgaaggtagtacttactattctctctaaagataatctctgtacgaacagtacatgaaattatgttgctgcaggcgttatggtgttattgtttcattgcaccttatttaattgaaggctgagtttgaatcttagtcgttgactctaaggttcatactaatctaatcagtagaacacacatacttttatgttttattaaataaaatctatttatataatatatagaaatagtagcagtgtattatttcatcatgacaaggccacaaaggtgaatcaagcgcctcacgtt

SEQ ID NO: 124 - DNA, 2800 bp, Zea mays
atttaatttgtatttacttttatgaactatattttttaatattgcttagttatatatctagatgtaattgtattttagtaaaatgtgtttcatttcaaataagagtatgtaaaaaggttgatgtagcgctaaggtgactataggctaatagtaaaggttgtgcactattactatgaacttgcggacaatgatagatatagattgagcgatagctgatgtggcggtagatatagactagtggcattagatccgatcttatattgctagagatacacataaacctcacggtcatcggtggcaaattaagttactaccagtaaaatgccaactggagaaggtactcgttgtggtgccattcttgcgccatcctcgatgtcaaagaaataatttcttgcgttgaggatttcgacatcattactacctgctcccacaccatcccatgcggttgcatctccttcatcctctcgaccactggtcgcttcatgatggtggtgccctcttcaccgcctccccatccggccatgttcccatgccgatgctggaccgctacaccacatatccatagcctccggctatccaccgcactttaagtcggacgatggagggagcgcaacaggcgggccacaccagctatttcttttggaaaaaactactttcgggttcgagccctttggtttagcttttgatttttaggggtaaaagccaaaccaaacacaccctaaatcatttacttagtttacgatacagatggcggtgagcttatcatgttattttatggtgataaacaactatgtgtgatgatgagttgctatggaatgatataaacgattagtttatttttagtaaacgacgaagtagttggatctactggagagccagaatttattcaaacctggacaaattaaaaagattaaataatataataaaaatgatcataggaagtatttattaatcacctataaatgtgttactgatatttaacacgaggtagacttatcttcgagttttttatgctctgaaaccgccatgttatgataatattatcaagtattttaaataattttcacttagtgtatcacatcatcaagtgattgaaccattcatctgaaatcttgttgtgcattcacccttaatttagtttcattatagagaaaactctttcaaccaatgctgttgaaaatgacagtaataatgtcaatttctcccccacttagtcatcggtgaatgtgaatttttatgcattaataacttaattagtaacttagttagtaatgtagttcatagcttagttattacataactagttaagtagttagtgacctcttagttaactagtcagtagtaggtaattactttgatagttagtagttagatagctacccaattaatagcggtcactaaaacgatacttccaatagctatgctgccaacaatgatatattcttaattttaggcagacaaatacaaggttcaagtgaaaaaagatgcacttacattgttcttgttaccacactcaaactcaagcaaacctccacgtgcaaggataactagatctccacaatcacgtacacaaagagagttatcaagtcgttcgttggcaaaaaccaaacacatgattataaatgtaaccgatctgcctaaacaactttgcttatacaccaaaatcaaaattatctacctagggttgcaaatttcacataacataagctaactcaacacatataaaatgaggaagagatgaaggataccttgctttgaaaggtctaaggatcaaatccaagcttccaaggttgaatcaatagattagagaaggctggaagaattggggacagggagagggagaaagatgagaaataaatgaggttcgccccggctagtgaactgatgttgattaaattagagcatgacgtcacgagctatgacattgaggtactgccacgtcagagccacaataacgttcactctatttataacataatacctcggtgctttgacctataacgccaagccatataacctcaacaccattggtcacgacgctcacagccgagtccaaatacggtatcaatcccatcaaggatgtaattgtaaaatttttttataaaagagaggtaaaatacataaaataccgagtccattattaacatgtggcaaagactctaagcagactaagttgtgtttgtgcgtttctgtaaaatgcttctgctgctaaaaggcaaacaccaaccaacaaaatgacagaagcacgagaagctaccttttcacgaagtggctgcttttgtatagtatcattttcagttgttttcaccaatcaacttaagactttttgcagcacatagctcacattacccttttgacatcttatggtgtttttttcacaactcagacttgaacaaaacatatacgctaagccgctaagggcctatttggttcctttggactaaaatttagtcgagtttgtagggactaaaagtatttagaacgcattaagtgactcgtaagaagactaaaatatctcttaacaatcttctgtcattagtgtaacagaaataaatgagtggcaaaaggtggaattaatatggtttagtccattttagtcaccctttgaggtactagagactaaagcagtttagttcatgttttagtcccaccgtttatctatttatggactaaatgagactaaaatagaaggactaatctttagtccccaaaccaaacagggcctaagttcactccttagttacaagatcagttgaccaccaagcacagaagtttctgataaagcatcaagaagtggact

SEQ ID NO: 125 - DNA, 2107 bp, Zea mays
atcatggcgttgtctaggagacaactagtcaccgcctaggcatccagtcgtccgggaatggacatggctgttcgcctcgcctggagtaagttaggcaagcaactgggcaggtcaggcgtcgatgtggcgtctaggcatctgcctacgcaatgccgtgacttcgccgtgctgcccagcccatctggagttcaggaccatctcttatccctagttctcattccttcaaacagtgcatccactctctccctctccagccgtcccctacccacctggtagcccggccgctcctctcctccagccgccggccaacggccatccctcccctccagcagccgtcggcctctcccttcgctcccctccagcatgttgctaataacccgctgctcagtcatcggaggcagcagacacttcactgtcttatgtttcagttgtctcgcgttcagtttacagtagttcgtcagaatctgttttcagcttcagttttcagcctgttttaggcagtcccgagtctgtccgcctgatgcatgatgtgttcatgcagagcgttagttagactccgcgaatcactagcagatcgtggagtggcacgatttgatgtgcgtgtgtgagttgattaattacggattgtttggtttatagggactaatttttagtccctttattttattttagtttagtttctaaattatcaaatgtggaagctaaaataaatttgtgttgtcctttaatcttttgtctatataattagttttataattatactatattaaatactcgtaatttacatttaaacatttgatatgacatagactttaataaataaaattaaacaccctataaattagttggttgcctaactatcccctaaacgtcctcgcggggcacggtaatgaccatggacaagcatcgctgaagcaaagctccacaaatccctttagacttcaaaaaaaaatcctaaattatgtcatcacgcattctatggctgcttgaaacgataggatcacagtttaaaaatgctaggtgtatttgctgagatgcagtacaataccgcaacattgttcatgcttgaaatggtaggatcacaatgcatcggtagcctaatgccacagcattgttcataatccgagagggtggcagagaaaatatcttacgggaggatgacgggcgcccagcccacgagaacgcgacgtcccccctccgccgcggtgccacgcctggcgtcgccctcaccctcgcccagcaccactccaccagcgagagccgccgcttccctcccccagaatagcagaggcgggccatgtttagccgcggcggcgagaggggcatagtgcagggtcgatcggggctcggaggcccccgagacgcggcgggttactcatagtgattaaccggatcatagggtctgcatgagcatgttaggtgacaaaggatcactgaattccgatatgtttgttccttgaacgagatttacagtttttttagaaacatactgtgttgagctcaatagatcccaacacgcacttagggtccgtttggtacagttccagttcctgattctttagctctagatcctaatccttctaaggagctgatccttctgattcctggagaatcggaatcattttttaaaccgtttggcaagtaaaatgattcttgtctagttgacatctttagaagaattttctatttcgtcttgcatacaccaaacgtgcgttcaacaaatcaattacaagcaataatacaaattgcgggtaattttgggtaaactttgaggggaggttcatatttggttggttgaggagctgttttgagggagggtggagcagtttttttagctcccacatttctataaaaaacgactcccaatccttcctgctccacgtgagaatcagttcacaaaacacttgtttggcacggctgctctggatctccgtctaggatcaggagctggagctgtgccaaacagacccttagactgtgttgagcggttccctctaaatttctccccctatatctcactcacgtgccacgtcagcgttctctttccccctatatctccacgctctacaacggttccccctatatcaaacctctataccccaccaca

SEQ ID NO: 126 - DNA, 2502 bp, Zea mays
tccgcgccctagggccggacggtccacgacctggcgacagggtcgccttcctcctccttgctggaatctagatctcgtcccctaggggaaaaagatcttaaggtgctctgggtcgacaggtcacccagggcgtccccagacgacgtggagtcgcctaggaattaagagatcaattcgaggaagaggtcttggatggacaactagatcttgcccctcgggaggggtgagatcctggggtcgtcttgggatcggcaggccacccaagacggatctagacgacgtagagtcgaatagggatggaggtggatatgtggaagactacaactagaactatgctacatctactcctaaggcaggaaaagtaaataaggtaattggttcgattggaatgtgttcgggggttctcaatcggccgtacccctttatatttataggggagtctggaccttttcctagagatagccaacaaactcccacgtgattagatggataaccacgcacgagataaggataaatatccgagttaatctaatcccgggacacgcggaccgtccgagcccaagggccggaccgtctgctcattttggtgcccaacaacgtccaattttcttgctctagcacccataacatgatagattcctgaggggcagaatatataatttctttatctccaagactccaaacagctaagaatcacaaatccagtttcctgccactaacggacaactcttaaagaagtttcaagctagttttcaacttaactttcagtaaaattttccaaaattcaagtagatttccatagaaatctgaaaacaacattttggtccaaatccataccgaaaatgttcttcttaatcttctacttctgatattccctaagaattagctgtatggtgtcacattctgacatgtattctatatagttaaaaaatgttccttattacaaacacaccaaagctgtaatatccctaaagttgtcatctctaggtaaaaatcaactgatttcacgtttgaattaacaacactaatttatcatgacaaggtcctggcttaatgcctttgtatggcaagggctcacctccagtaataagcaggtagtggttgctacgtgtgcaatttatcatatcgtgatacaaaagacaaaaccacatagtagcgtaacttcatcagccaacattcttttgggcttctggctgtgaaaatttagatacggtaggtttttgttccaacaatttatgggaaacaaatacaaagatcaacattaagtcgtgcagtttaccattgttaaacaggcccaaagtgattatatatgcaatacaaatttctggattcttttgcaaattctgcacaaaatatgtgcaggactatttggttgtgaactctcaagagcctcgccaaagttttggaatagccaaaaaaacaaacaacaacaacatttaagcaagagaaagtagaaaacactcgttgtttagattggccatacatgatataactggattttcgttgttagagttgccaattagtgttactgaatttgcagtgctattagtttggcttgatatagtagaagaccaaacaggatgcatcaataatctcattatgggctatggccactccaggatacctttgcatccgaccacaaaatgaacatatcgagccaacaaacgcaccacaccacagcaggtacaactcaaactaaatggacaagaggaaagcataaaccattcacctgtgtgaacagctcaatccccttccctatggacactagatccaggttgtcgtcgaagcaatacacgtgcacgcggctcccagagctgccggcgtcaaatatgacggcatacttgttcagtccgtcctcgacggcccggggtccccacctccgaccaccaacggcgaggagcacaccccctgaggcggtggccggcgcacgcggcatgagaaggcgcacgcggcatgagaaggagcacgaacgagatgaggaccaccgacgagagcaacaccatcagcacccgacggtaccggtgcacgcggtcggccaccgcctccgtttgctgctgctgccgtgctccggcacccgagtagcggcgaatcctcgcggccaccactgtggctgccgcggcatccgccgcgacatcgtcagcggggagcagatcgaccgccgagggcgtacggtagcggatgcgaccgttggtcggcgatggtttcaccgcctcctgctgcggcggctccagcgtgtcggtgcgtgcggcccggagcaagaaaatcgaatcgagggagagggcggcgcgacgggtaccttctccggcgggccgaccgtcgcacttggttcgcctctaagaccgtcttcggagtttttcgaacccgcgatgtgtgggcgaaagaagcggctgcgggggaggaatgcggcgtagcgtggccctccatttagcgtgagagagaaagaatcgggaaggaagaggaggagaaggaggacgccggtgaaggggaaggaggcgcactgta

SEQ ID NO: 127 - DNA, 2607 bp, Zea mays
tcgcgcattgttcacgctgtcagcgccttttgcagtcgatcgttgcgcgaggtagtcgttgctccgctggtgcaccggacagtccggtgaattataacgaagcgcgtctgtgaaaaccaaaagtgggttggttggactctgtatggtcctggtgcactggacactgtccggtgacacaccggacagtccggtgcgccagatcacagcacacttggtttcttttgctcctttgaaattgatccctaacttgaatatttattggtttgtgttgaacctttatgcacctgtagaacatgtattctatagcaaactagttagtccatgtatttgtgttggacattcaaccaccaaaattaattgtaggaaaaggttaaccttatttctttttcactgatgacatattgaaaaacgacgtcattgcagatcccagatgacttgactttgaacagactagttgaagaacatgaatcctttcctatattactttgctactaccttttatagtacatgaaagaagaaaagattatatattggtttgactatagggcctggtcagctgtggtctaagtccaacaaccccaatctatcttggtcatagcgccatggctttgatcgtactatagtcctgttgcaggggcagaggtgtatctataataggggtacgttgtcatgttgtatcgttgaacactagatttcatgacgttagtcacaacgtagtaatcgatttagtaaactatactttataatacttcatcgtacactagtgtgtccatgtgtggctataggagcgatgacacagtatcggatagtggtctttagtgcgtctgctgcctaagtttacagtgtctcaggtctagaattttaggtccttttctcatagggtctgttcggttaggggtaaccgaataaagtcttagagccggttcgattattcaggaatctagtccaggaagcatttcagctggaataattatataatttgtagtataacaagttacttggaatagttactagtcttattccagtctaatcgaacggggccttaaggtgcttgagatcgaggtcattaggatggtggacctataactttgccaaagcaaatgcaatgcaaggtatatcaccaggagatgtgcctcgtataatttgaaggtacattcggtgatacgccctttctcagacgtcgacagcatgcatatctaactctgtatgcaaaaaaaaaagacatatgaacgaagaattcgatcagcacacgcatgtttaagcctgcaccagccagccagccagtggctcagatcttgagacgttgaatctatccagtcaaagctggatgatgcatatggatgggatttggtcgcagtacaccttgtcggccggaaggaaagctagctctgggacagtgaggaggggctagctgaggcctctatcgggcgaaaaggagacgagcactgcccttcgccgctgtcagcgcagcggtggagcacgatcgctttcgagatgagaatgagatagacgacgacaactgcatgcgttgatgtgccatccgactgtcactcgcggctaataattacatccatctctgcaccggccgggccgggccggggtggtttcagtttcatccacacaaacaaaccacacactgcagatccaccggcatgtgtagttgcatttcattgcatatcaaagcttgctgaagattgattgatgctggcgtggtgtagtccatgcgttgccgacagcgtgggtcgtcgacggatcggatgatctacactgcatccactccacgcctttaatttgcggctagctccacttggcgggtccttgatttggctttagaagagtcagtgcctgtctgtgctccaactagcttattcaagcacatgaaacaaatgcgcgcgcgcggcagaaatctgtacagcgcggccaggctcgatctatctgtgtggatggatgatcgagctgattagtgcgcgacgatgcttaacgagcaatccagatcgatctccagactagtgtcgtcaattcgtcatgctatattattggcaattggcattgtgcttttcaggaggagatcttgcattgtgaagctactatcaggctttgaccaaatgctgcaaattaagccagaggtcgttagtgatgaggcctgagggggtgcagtggtgtcactgtggcctgtcggggtagtacagtggtgccggtccacatgtcggccgctgccgcagtctgattactatttgtcaatggccatgcatgcgcctttgttaaaaagagagagagacatgcgcaatctgattactatttgtcaaagtttcctccacactaatttttttttacctccacaccatctctctagctcaccatgatatatacaagaattcagtcaggctgtggtatgtggagcatgcatggaaaccaaagtctcatgatgggagcgacatgattagctccaagtttagtggacaatctcccggtcaacccctggcctacactaaaaaaacagaacgccctgcatctagtctactagagaggaattggaataaatatttagcggcagattgcattccagccacacgtgagtcttttctctctctatatatattaccctgg

SEQ ID NO: 128 - DNA, 2095 bp, Zea mays
cgtatgcgagtttctagagagtgtggctggcttcagtcgtactcgtacatggtcaacatagtttagttatcaacggtgggtgctacgtagattcacatcttgcctgaaatttatttgtttgggacttgtgagccgctagttactgcgggcttgatagacaacgctaaacttcagttgcatttcaggattttagttcgttgtagggagaatgagctcatggatattgttggtcgctcgcttgctgtgtatgacatcatgacgtccttatacgtccagttcagctctattactgtctccaatagagcgtataaaatagagtacacgaaactgtataagatactacttgatattgtttgcagcgagaaatttaaaatagaggataagatagagaatatgttgaagatagcctaagtatacgatctgaattctgataatgagatcctgatgatgggtggtaaatatagttgaatcatattacaggcttacatgtgtgctatttcaagaaagaagatgatggcatccatgtgctcatagccgcaaaagtaccctcttattttttatttatcgtattttagttaaaaaataaagtagcatacaacatatatttgagaacggagttagtttatataaattcaggctcagccacgggcacttaacaatgaaagaacttcaacaagattatttactttctactacactcaacaacaattaataaatcattatgacttctaaatatcattttacgttaaccactctgaacctcactgtggtgtctgaatacttattaaacgacagccagagccaccacctatgagaggctggaagcaacggtgccgccggagatggagacggaaaaggaggcggcagcggcgaggcaggcgaaggagtccctggagctggcgttccagatgtcccagatcctcgaaaccggcctcgaccgccacaccctgtcgctgctcatggcgctctgcgaccgcggcgccaaccccgaggccctggccgccctcgtccgcgaactctcctccactgctcccccaaccgccgccgaggctccctcccccgtgagcaacgccgccgcggggccggccccggcaacagcgtccatgttctcctccggccttcgccgtccctagggtttgtgatgtcccttttttcgccggtgagactgcttgccagttagtcgactagatcccgcagtatgcactcagccgctgtgagtgcctgaatgtagtatgttcttatgttttgactaaatttgtgcctcacaagaagataatggttcaaccaaatgccatatatcacgttactgcgtagatgtgctgctacctgcatttggcatcaagattcacattataatgtctatgtttgggttataatattaatttgcagccaggtgtttctacaaatagtcaatctaggcatgggcatatgaactgtgggttggttattctttctatgcaacatcaacggttgtggaactttctatctcttgttctctctggctctgccacccttttagctacaccttgtcgggtagtggtattgccatgatatagatttgttgcagttgctagtagattaatgggatgcttgttgcttggttgacgaatgggttagtacatcatatttccactcctaacttttttgtttgatttgtggaatggaatggattgatccaccaccacatcattccttataagctattagtataaccgcatgccactaaaattcatgggatgaacacatgatggaccacctcgcctgtgtccggtgtccccctccccccgactttagtgtccataggattttgtggcatccctttcttccccagtgagattgcttatcatcagccaaagtgtcaaactagatcccacaatatgcatttagctgctgtgaatgactgaatgtagtgtttccttctgttgattaattttgcatcttggcttatgattcacacttcacaagcagataatacatggacttgtgtagtcctagatgagttgggtcagacacaatgtgcataggttacatgactgcaaacatgtgacgcgtcctgcatttggcatcaagattcagagtataatctcttcttggg

SEQ ID NO: 129 - DNA, 3324 bp, Zea mays
aagacaacagacaagtagataatgagcaaaacagcgaacaaaaaaatcaaaaccagtagacgaagaacctacgagaggtcatgagtatacctaataatctgatatatattgaagatgatataatctgatttagagaaggactgaagggtggcagaggcagggcattagggcgagggctctcagtttccggcgcgcgcggcgggctacagacctgcagcaaggcagtaagctaattacgtttcactaattgggctacgtgctacggacctgcgcgcgtcgggccaaggagcgctctctgctgcatcatgggtgatgggccttagcgtccactcgtcgtctcgtccaggtatatttttctttctttttccttttttagtttctacatacaacaatattattatataatatgtaaatattcactgattttgcaggatatgccggtgcatacccgacataccctatgtgtccgccactggaagcgggtactctcaaagttggacacaaattatctacaaagttcttcccaatattatatggaggcctcagggaggctcataagtcattgttgggcagaaccaatcaaggcatcatgtaagtagtttgccatcacctttccatccccgcacaatggtgaggatggcagtgacgaagatctgtaataactcggtgggattgatagtcccatcatacttcttgcaaaggttgggtgaaattctatagacatggtgcctattagaacactagggtgagcgtcatatagccagcaccggtgggatggaccacctaaccaacatggcctataggtggcgccgactccatagagttgaaaggacctagatagctagatggagtgaccgatcaataaaaatattacataaaccatacaatatcaggtagagccaacatatatgaacatggggaaacaattactttctatagttttgttctaggttatttcttttgtcaaacttggagtttgtgaaagatatgtatgaggaagacaaggtactcaataataaagggaaataatattaacactagctacagaatgagtagatgaagtaatatgaaccaacaagtaaatgtaattgcaatatagtttaaagtgcaaaccacgtgggcaagagatgaaacaataattatctgtaaggtttagattcttactagcatcctacgtccccgttgtggcgagtctaaactaggtgattcacgcactatctgacataacaaacagaacacataaagggcactacaagaatcaagctagggatacactcctacaagccattattccactatagttgatatttgtgaatctcccacaaggaatgagcacaagagtccctcgcaagaatgatcaagtcgacaacaaacaacaaagtcgctcaacgatatcatgcttccttcaagctatctaggtgacaacaaccaccaagattaacaagaatattgtagttcaatatgatcactagtgccactagatataacaactcaatgcaaattattagagatcactctcaaagtcactttggatgaaacactatcactagtggtgagtgcgagatgttttcttaggcttactaggttgtatttcaagttgggaaaccagaatatccacccccaaacctaaccaagctctatttataaggaatatatattgtgcacaagaccaccgttgtgcacatatgcacaaactcaatctaaacccttcgtttaatgatctttagttgacgtgaaaacatcttctgcactctcctcccctaacctagctacatatgtgcaaaaaaaccatgctcgatcgaagattgttagatgaagggtccagattgagtttgtgcacatgtgccgaaggtggtcttgtgcatagatatgttgccctatttataaggtcccagggggaaactagccattggacttttactatgttgattttagggttgttggacgatctaatacccaccaacggaccatgtcgctaggttccgacgactttagaacatgccacatattagctatttcaatgttactattgtcgccctgatgattgctatagtatatcgttcgacaccctctatccgagaaccatcgaaccaaagtatctagagtccgatgcccttcgtaaaaagaccagagatctactggtagtgtctgaataatatgatgtatgtttttagaccaattcataggatatgatggttgtgttcccattcaactagtatgcctaatagtgggtacattcaatgtatagtgcactcattattcgattcgatgcacatgtttttcaattgtcaaactaattcttcagggtccaatgctctactgaaaatgaattgagagcatttgtgtcatggtttttataggtaccctatacatgaggtacccactcttgctaggtcaagataagaccccaatggatgccattaagggttcatgggtggccagcccaacacgggggtaaggcctactgtatgaagtcgtggcccagcctggactcgtttcctgggctagaccgccaccaccacaagcacccataaaaggaggaatcaacaacttcagctatagatatggattcttgcgagtggaactcggacctcctcatcggacccctttgagaaaggggtacaaagggtctccacgtccatgggaagaagacactctttggctgcagcactgaacctccgggatggttcccgaccagttatatgtcatccggacctcaagccaagtggggtccggtgccgccatgtgtctggaccgatgcagttggatccaggccccctcgggcacggttcggggccctagccagagagggcctgggaatgctgtgtccccacatattcctgggcctgccccctagtccaagacagaggtctagtgccaacgagtggccaaacatgtctagcgtaagccaccggacagtgcctgatgtatgcctctgacatggggcccactagcattaggtacggatgggatgcatacttacccgcgccagcggcgtgtagcatatcccctgcattaaatacgtgcgacatgccaagcctgcaacttgcgaattttactgttacccgaatgttacctaggcaagactattgacccaatgcgccgcttaggcgcctttatttatgacttcattgctccttgtgcgttaccgaggaatgaagagacatgtggaggagacgggacaatactgtccaccctacgcacggcagagtttcagactatgccacaacctactccattagctacgcctcgaccttgattagaagggatgagaggataggatatcaggagccagcacaacgaccaagaggagatacacgctta

SEQ ID NO: 130 - DNA, 3544 bp, Zea mays
caagtcaattttggggtcccattttacaaaaaaaaagagttttggcctcatgcttataatcagttttggtaaatcatagttatcaatctcgttcatcaattaaaatcagcgacaaagagtatatatgttctatatgaccatatatacctttgtatgcgtgatagacaatgaccttttttaatagaatcgatagagcccagcacaccagtttagttcatgaattaaaatttgataccagatgttaagaaaccctataaaaggttacgtcggctagtatcaaacatatgcctgagtcactctacctttctatataataaatttatgcccttataatgataacgagaagaaaatgagaaaaaagaataaaatatttcttgtttaccgataaggggaaaaaatagtctttgacatgtcttcattattgacggaacattcaaaagccggatcgacatcaagaaatgtttggttccagccaactaaattttagtttatcacatcaaacgtatattcgaataataattacagatattaaatgcagtctaattataaaactaactatacaaataaaaactaaaagacaagcctaatcaagccattatttaatattcataattattttaaatacttgatgtgacagttcggaacgaaacatctccttactggctaacaaataacaaccaacccaccataaaagagcatccacgcgtaaagatgcacggatcgggagcagctagcgcggggaagctttgcttggctgccgcacgcacgagttcgcaaccaatccatcgggactcagaaaatgggatctgggtcggcatatgctccagctctacgacgatccttcgtactagcaatcgtcgtcgccggtaacaaacatctccagacactagggatctgatcggaagggggaaactgtaataaaaaggatttaaaaaaacgctactggaccccttacacgactgtaccgaagttattggtcgcgtacaaaaatatcccgacaagaaagagcatcgcaatcaggcgtctgcgtgtgccgatgggtctgcagcaacgatcgggccccgcctcgtgactggccaatcaggcatcaatggtcgatcgtctaaactggggaatctcacgccttcatttcaaaggaaggccatataaaaagcaattttcctagtacgcccatttccaaattgtaacaggatttaattttagtttttattacatactatctctgagaagaatacatacttttaatatcaaattgatttataaaacaatccctatgtgcactatagatagaccgtacgtagcaaataaaagcatatccacgtgaaacacgccgaccaaaaaattacgaggagaaattcctcgcatcatctcacagcaaggatcactcgagactactttgtcgttaaattccgtagatgtcatagtacaaaccaactcggcaatcggtcgtgtgactgctcccaaaaactagatctatctcaatgtgtgctacctctttagtagagcaagattttggagacactgctctccctatcgtcatcatcatgccgatgttagaggtggaagcatcaaagggcgcgcgacatcgagagctctctcgagattggttgtttcttgtaattttagagaaaatgaactttctattatataggggggacaacctttgtgattacccattacctttcattataggactaaacttcccatgatttattgactcatacacgaatggatatttgagatttattctatgaattacttggaggaatgtgggggccaaagaccagataatttcaacaatcctccaccaaatctcgaaagcaacacttaatcggctctcaagaagtcctcaagtaccgtttggcatatcaactttatgatggagactgtttatctttcatgagctttttagagaatttccacaattcacagatcacgaccaacgtcaacccataccctgcaggacgatatctcatatataagccccaaacacattaagacaaaaaacattctaccttacagaccatagagtattacatcttcactagatagtgtaacataatgtgtactcttgttacatatacaagttttttctagagtcccaacacgttggatctcctatcataacgtttggtttgctaccgtgcgtaatccaggtgggtctcaaactcatctccttaatgcattatctatcatgtttcaagataaacctttcgtaaatggatctgctggatttttagccatgtttacataattaggaactgtcaatccagaggtcatgcaacatcgatgagtctactgagattgattatttctcgtatattttggggagaatgtcatcttattatatctaggagtatgctctcgtgattactgaaatgttttggtggttagatgctcaacacatattgttttggttgatataagctaagtgtcaagagatgcaaatggaaaaaagcaaggtatgactctagctttagtaaattgtttttggtactaacattattctactaagtgcaaagaaccttgtcaaatcgagaaaatcggattggagaagtttggctaagtccagccaaacttgcaccagctcgcggtgcaccagactgtgtctggtgcccaggctggcgctccggtgaactagccgatctcgggaaaatctgagggcgtcgcggctataattcactggactgtccggtgagccagccgcgcccacgccaacggtcggccgcgcgatcagcgggcgacacgtgggcttcgccaacggtcaccaggtcgcaccagactgtccggtatgccacgggggtcggtggctgcaacagtcaacttcgtcagaaaaggaaggaaatcacgcactattcactgtccggtgcgcccatagacaccaggcaactaaagctttccaaatagagttcaaacggatcctagctaccttggggctataaaagggactcataggcgcatggagcagtacaccaagcacccattgaacattctaagacgccaagacttcgcatacacgtatttggttcatcatgatagtgaatcgagcacttctttgagttgtgactatgatgtgatgcttttgtgtgctcgttcttgtcttgtgtgcgtgttgttgctacactctcgctcttgtgtgttttgctattccccccttactcttgtgctcattcgagatcatttgtgtaaggtgtgagagactccgaagtgtggagattcctcacaacggtatattattgagataaatagaatcatggtattcaagttgatttttggatcacttgagaggggttgagtgcaaccctcgtccattgggacgccacaacgtggagtagccaactattctacttaatcgaaccacgggataaaatcgttgtgtcaaatgtctttctgagcaagtagatccaacgggagagtgcagagagtgtttgcaaagttccacggggaatgacaatagctctgttaatctggcctctcaagggcactgtacggtggtatttataggcacccgagtgaccaccgtcctctggtaagaacgtttatg

SEQ ID NO: 131 - DNA, 2916 bp, Zea mays
tgcctagtaattgatgccattgtgtaccaagggccacaacacatcaacactcatcacaaagaagcaaatcagtcataacacaaagacaaacaacacaagcatactacaacaaacatcgcatttctataagttccttttaattagatggtggtctttcttgaaaagggaataactactctccaaggtcgttgaaagacgaggagaagaacaagacgtatgggaaaggagcatgagcacaacaaaggatgtagttgaagcaagacttgcaaagcggcaaaggagggaacaaccatggacgggataggtaaaacaacactctcaaactgaagtgggagagagaaggctttaaaatgcaggtacaagataagcatcaatgtaaatatcaagagatgacaagggttaaaggtaatagcagataaacacacgacaaaggatgcagttgagacaaaacttgcaaggcgacaaaaggggaaagcaatcaagggatagataggtaaaacaccactctcgaactgggttggaaagaggaggctctaaagggtaagttcaaactaagcatctaggtaaatacataaatatcacaagggtcaaaggcaatgatagacaagggtgtaagagaaaagataaaggcacagaagaaccaagggtacaagtacaacaaaaaatggagttaagacaaggcttgcacatggcaaagaagaggatacaaccaagggtgagataagtaaaacaccattctcaaatcgagatgggagagaggagatttttaaatagcaggcatattgttgtcaagtactcgggaaccaggtacccaaaatagaccattcaaaaacgaccaaatccactgaccaactctgtgaggcggaccggatgaccaactctcggaccagatgaccaactctccgatgatgaccaactctccaatgatgaccgactctctagtgatgaccaactatcggatgatgaccaactttgccgaccaactctgcgagacagaccgaatgaccaactattcgatgatgaccaactctctggctatgaccaactctctgatgatgaccaactttctagtgatgaccaactccgccgaccaactctacgagacagaccgaatgaccaactcttcgatgatgaccaactctcatatgatgaccaactcttcgatgatgaccaactctctggtgatgaccaactcttcgatgatgaccaattctcggatgatgaccaactctgacgaccaactctccaccaatcagcttcggtcgaccaatcctccgtcgagcaacctagtgaggcagcgatctaagtccagcgctactgatccatgtcagctatgatgggacatcggaaggacgggataacacgctatatcgagcgtgcgcctgcacgagctggcaggtggcgaagggcccatgacgacaggagaagccatgccccatacgacaacactttgatattgattcgtggaacccattatgaagacgtcagcgatggactcgctacaagagccaaagcagcgggaaaggacgacgtcgagccaggagtacggctacgcatgaccctacgaaggacccaccacgccaacccggggagtagatctatctccctatctctttctttctctctccagtagaatacaagtcccactgtaaggttctacacttgagatacaaaaggacagggccccctccttcttcctacacaaacacaccagttgtaacacgctccacagcaatactatgattagcactacactagactagggcgcaagcctaaactaatataatcccccgtttcagatccatcgttgagtcctagcgattcaccattcagagtgagtccgcactagcatcccccaccgaaaaaaaatcttattgccccctggattccgaaaccacgacactatgctacacgaaacatacccaagaaagacataatcactatcattggtccaagcttgcactttttattaatcggcacattgactttcgccatgcactcccaagtgcgcaagtatgaaagtgatggttttcttccaacccacttctcataagaggtttttatcttctttgctcataggaattctattcagaacatgacacaaagtcatactgcctcccccaccataccttagataaaccacatgtgtctaacatgacatttaccaagtcagacaacgtacaattttcctctcagcaatcccgtttgattcagatgaataggaaagtgtcctctcatgaataatgtcatgttctgcacaaaaagcatcataactttgattcggatgaataggaaagtattcaccgccgaggaggatcctctgtggtcggacatctctcgagtcgattacctaggtgaacatgtagcatcaaaattttaaacatgtaaattttagttaaaatactaacaaagactaggaaattatcaactcaccgtccatgcttctttccaccaccaccgacatgcattgccaccggatcaattggtccatgccgccaatcgacgtcgtcgctatatggtgtcacatcatctcctacccttatttctcctacaattaagaaaacaaatttagaattggatgtttcaagactaactctaaattgtaaataactattcaatcattcagacatctgctgactgcaaaggaccttaatctatgtcgggtctgatcccctatgaccctggatgtattgtcaataggagatggatcaacaccaacttcaactttatgtatatagcaattagtaacagaaaagggaaaatatgttcttgaaacggtatttgacatatctcgctataagtcgacacatacgaatgtacctatcaccgccaaacgtatactcctaacccttattagcgaagctactcttcttcgtggacttctcttgaaattcttgagaataccataatcgacaa

SEQ ID NO: 132 - DNA, 1272 bp, Zea mays
aagttcttaaaatcatcttgtttttggagggtgtatttttatataaaaaaagaagttaaataaaggtaattttaaaaaaaataaatcgcagtggaggcatctatggctggtctaagagcagctccatagttatgtaaattttagttctctaaatcacatatttaaagagtgctctaaatcacatattttaaataactttgagagtaaaaaaattatgggttcttcaatacaggttgtagctttattttgaatctatccatgtcaaagaaaagccacaatgtttttttaggggagttaataaatggttatcaaacgtagagagctaaatttaggaagtttatttagaaagctattggagagcaatttttagattaactatctaaattattaatttaaagagtcttttagggctactggtgttgctctgaccgtccgcaggagtactagttggtagtctcaagtctctcagctctcaaagcattttctttgctgtggttttcttttgttcttgcttgcttgtcaggtagcacggctgctgagacattactgtcagggtctcacggctcaaggagtaccaagttcaacgccggtgctgttttcttagcagtgctcatagccatagtagattcctaccacgcctacacctggcttatttctttggcatggagaattccaagaccaagagagccgcctagataggcgtaaagtgtagtggtgtactctgtctcacgtgcgctttgcatttttagagttcaaattttgtcataaaaactacatggtaaatatgttattctcgccaaatcccggtgatgagcgaagtcgaaaaaccgctcaaacatcaccggaattcgtaaatcttgaacggtttttacttcaaatttaaaaaatgaaatttgctattctcgagcggtattcgatgaagtcccaagcgtttttcttttgtgatttaccaccaaaaaatgctgattagttttgaaaaataaaataaaatatgatttataggattttttccattttttatagatattatgaaactcaaatttttaaacaaattttctgaaagtatcatcggggtctatttttgtctagtaccgctaataacaaattttactagtaactaattgttaccgtgcgggatttgaaaccatgcattggagcaggcgagcagccattggaagtgcagcccaggaagaaggaacaactccgacgacgagggatatttgtttttttagttagagaatgtgtattatggctttgttccactctagagta

SEQ ID NO: 133 - DNA, 2899 bp, Zea mays
atgcgatctctgaaatctgtacaggaattggacagattcagttactgaatttaataaaagcataacttctaaactatcaggtttatgactatcagattttaacacaagtaaggtaataaagttatctacaactttcttgtgaccacaaataactgatttcgacaataacttaagcaaccattgcaatctctaaaatttgttcagaaattggacaggtttagttactgaacttgtgaaaagcatagcttctaaacgatcagacttatgactgtcaaatttttacacgagcaagataataaagttatgtacaacttttctatatgacgtttctacagaaaacatattttacttgactagattacactcacaaccaaaactgtacacgcaggaattttagtttgctagcacaagagcactcaactcaataatcaattaaaattatggaaagacactaccatcaatttctcaagtttaaaccattatgacttagttataaagtttcaatttatattgagatacttaagcatttcaaaaaacatgcacgcttttgttttcttctaatttttcactaactcttcttataattatgaaatgggtgttattttagcaccatatgaaactatctaatttggggttgaaatttttatgaggcataggtaatgacaaatcatgactaatgtataaattttacatgctcagattttatattttatttaatacaaaaataacaaattattaacgcaataaagcatgtgagagcaagttaaatccaaaactaattattttgtgtggatgcatgaccatattaattttttaggctaatataatatcatgcaaggacagtggaacaccatttttcacttttacttctatattatttataaaccatttaaaactacctaatatgcatcaaacaaggtaaatcactaacttaatcatacatgcaccaaaattcatgaaatttttaccggtcaccaagaatcacaccaagagcctactgtaaaaatttgaatccatttggatcaaaagagctatagatctaaaaataacaagcaaaacaattatcttttatatttttctcagctatagtatgacaacatctaactaacaaaataagtttcattaattttggatttttataattaaaaatttggagagaagaaagttcatttattttgtaaactagttttaaatacgaatttctgcagaaaatctttccactaaaacatgccaacttatagatctaatagatagataatttcataaggaagggaacaaaataagtttcacaattttaggagctaccaaactcaagatatgaattatagaagatattacgaaatctggaatttgaagcaccattacccttcgccttgggcccacacgtcagcctcacaaacaccttcttcaaccttcagccaaccaacagccaatgaacagccacsaaacgcaggggaaaaaagaaagggagggaagatccctgtgcggtcggagggggagggagaggaggaggaggccaagggtatccatttataggcgagggagcagcaaggggcggacacaaggcagccattgcagacgcaagctctgtgtattggtgggcatgggtggctgcgaggcattgcacctttccttatggacgaagcaacgaacacacagtgggcggacgttttcgtcgtttcccccttagaatcggatcaaggtactgcacaaaaatatcttccttgatgtacactctacaaatcttgtaaaaggcttgaggtgattcgggcactggttagagagttatagacccacgaaaattggtttgtcagtggctcagaaatcagtggaaacttgtgaaaactgaatgtcaaagcatgtcaaacggaatcggatgaatgccatcttttaatatgttgtgcccctattaattattaacaacttttatatttgggaaaacttgagttgttcaacaaaaatgtgggaacacgagaagtcgacccgaacgatgctgatttcaaacttagaagaattcgaattctgaaattagatttttattctgtcttgatggcactgtttgagatacttagagattgaatcaaggcttagtttaaatataaaatttgttgtataacacaggttctacaatttttattaaaggtgaaacctcatatcttgaatataaattaaagtttcactttggtcaagttagcatcattataaatcttcaaattatatttttaagacaatcggggtatttctcgacattttcatggcattttctctgcatgaacccttaataacttttgttgtagagttgatatagagttgtttgagcaagatgacaaggttttgttgaatttcaaaattcgcatttgttcggacgagcatttttcagcatgtataggatttatcttttcatgtgtgtatttggttcgaacttttagaaatctttagatacacttgatagatagagatgaatgatgatatagagaaaacaagccgatttgcataagaattaattagaggttgacacaatagagattccgctggagaatgcggattcggacatagttcgactagcaactgtagagcgtttgattaaatgagcttcagatgcgaattataagttgagaatgatttttgagtttgcgttcgcgccgataattaaaagttttaacaggctccaaaattggttgtttctcacgatcgaataactccgaattcggtgaaatgtgaatgaatagtctggataatcagagacatacgcgagcgagaaatagaaatgttcactgagcatccgagattaggataaatatctcgacgtaacacgaactagacacctagggtgtcacacaaccctacctgaaagatgggcaagagggggcggcaatggtttggtggcagttcatgttaa

SEQ ID NO: 134 - DNA, 2534 bp, Zea mays
gtccattatttatattggtgtaatccaatcaactagacatcaaaacgaaacattttttttcccggatctgtatcatctaatgggtcggaccagtgaagcgctttttaaactgattgatgtttatactcaggcacttataagtaatttcatctaatattcatctattttaaggcattccatattacttaactcattgcatattgcttaagtcattttatctgttatcaactattttatcttattcaatcctttaattagttttttttaactaattttaagtcatttcatgtattttcagacacttaaccttactcggtgcttgttaatatcctttagttttcagctatttttgaagtcattccatgtgttttcaaatattttatattacttcatgtttgttaattgattgatgtttatacttagtcacttttaagtaattccatatgatattcagctattttaagccatttcatattattttaggtaattccttattatttaagttattttatctaattttcagctatttcatcatatttagccctttaattagttttccaactagcttgtaataatatcgtaaaagttatacatcggggataaccttttcataacggtgttgaacaccaaaagtgatggacggtctggctcaagggcccggacggtacgcgcccccacgatcagattaactcggatgattatccttatctgatgtgtggttatctatctaatcacgtggggtttgttagctatcgcctaggaacgggtccagacctccctatatatatgaacgggtacgaccgattgaaaccctcgaatacattgcaatcgaatcaattactttctttattatgtctgccttagaagtagatgtagcatagtctagttataactttccgcatatccacctcaacccctattcaactatacatcgtctagatccatcttggatgacctgctgacctcaaggcgactctaggatcttacccctcccggggggcaagatttattcatcgaattgatctcttaatttctataggactcgccgactctacgacgtctgaggatgccccaggtctagattccagcgaggaggaagacgaccctgcgccatcgtgaaacgttcgaccttgtgtgtggaccgtccggtgcgacacaagaaaggggtcgcttctgcgcccaggtcgtggaccatccggcgcgctgccgtagaggcactgtcagatggtacacctctagcgattggcgatgtgcagatcaactctaacaaaaagattttattttttaattaactctctgcaattctatagtaaatagattgtacatgtcattagagcaaccaataatatatatttgtggaattttgtagcttgcctggcactagtccatttatttatgtagttgttactttgcctctactctagcattacttcctatggttccttagtcgtcctgctgttatttccccagtgtatctggaaggaggttgccgacgtgattgaaggcatttttggatgtccttgcccttgcatgcagccgacgtgagaattgaatcgaagttatggtaaggttgcatgaatcaactccttttagcaccgcatgttgtcttaaataacaatgtcacatcagcctaaaactagataacaatatgtatagagttttaactcatgtaactctattatctcttatgaaactctctctatatcttttctcataattgcatttccatatcaccaagcatgatgatatgccaccgcatttaatgagtataaaactctcgtttagaatgtccttatatgagtgttggtaaacagtattgagaagaactatgaaacatattaaataagggtacgatgagaaattagcatccaccttggtatattaaatactgtccaaaacgactactaaaaggaattggcgggagtacttgctcttaaaacaatgctcgcggtgcccttggctactcacascggtttaaaacttattactcacagcaacggttgtctctaaagaacactttaaatttagggtctagctccaacaagaacctaggtcttgtaccctaaatttagaggatgatgttgtcctctactccctacaacagcgtactttaaacgattctctaaatttaaagaacgttgctggatcttctatatatagagtttctctaaacggtcctctattcatttgaatactytaaatttcgtcccctaaagaatattctctgtctttacataccgctctaaaagattttgtcatctatatcttgactctatccaacgacatcctctatattaaataatcaattaaaatcgctatgtcaacgtctcttccaagtgggtcccttaattgtccagagcctgcgaagagctatagaggagcctccaaatgtagaggtcgtggcaagactccgctattttacaggtccgtttagcgttctctgttggaggcaaaaaaaaaaagggtgcaagtgaaacgctatatttaaggtacatgaccatttacaggttgttgcttgacttctatcctaaacc

SEQ ID NO: 135 - DNA, 3034 bp, Zea mays
tctcgtgcgttgcgaaggcttacaacaatacccacgtaaactatccaccaaatttttttattgattgtctccgctcttcgtataatattttttgatttggctaactgatattactatttattccatgcaatatgtcttggtacaacacgaccaatgaagtgagcgattagaagacagttcacaacgactgactgaacaaatagagattataaaatgacataattccaccatacaacgaccaaataagagaaagtttgtgagctcaagtttctaaaataagtcacgtgaactcaaacttataaaaaaaatagatcgaaatatggagtgattcctaaagtcaggcataaataaaaaytgratgcgctccatataaattatgctacttcayagcaattactaacgtttaaaaccaacaaataacctttcattttactgttagtgtgacaaatcattgttgctccatccarttcagcaacctcaaasaccatgtagtccattgcgccaatgtggtctcagaaacgacctaatgcttgcaagagccaakaacgtcgtgtcgygcttggctgtagcctcggcccgtagtgctggccyrrcccgacacgattatattttttttattttacaaaaaaacktatatacatatatataatttatattcaatattaaaaayatctkagtatgatgttytactggttagayagcttcaycyagtststcccgcccttcttccatcagggcatrggttcgaaccccacctcctkcaccgttttttaacattttacgctgatttaatcaaatgggccgacgrgctaacggkctggcccgacacagtcagcaggccggcatgacgtgcctgdgcyakagttgtggcccrcgkgcgtytgcgttggawggamcsttggamgcaggaggcattgacttggcgatcggwtaagtagatttcgtgcagtcaactgaactgaaccgcatctgtctactctgagtacgtttggatgaagatactagagaggttaaaattgaattagatctaaagaggatgaaagtggatatctgaatggttaaaagaaatttaatattttaaaatgtgtatgtattaaatttggtaatgaatttttcttatgttataagtacattattacaaactatgaatagaattttgcataaattattttgtgtcatttgctccctacaaccaaaaaggtaaaaaatattggtatttgtatctgattctgtatatatctattatttgagaagatatatgataaaattgaggtttttttatgaatctttacaagctcaatgttaaaaataagattacgaatttgtattacagattttatattctaatgttcgcaatcaaaaaaattggtaatcaaaaaattggtatccgaataagtatcaattttcatccctaattagatccattagcaaatctatctagtattgaaaatgagttgcaatataaatctattgttcggatgtaacaaagggagggtcggtccaccttccacttatgacctacaacccctaggtctgtggcacactcatgacctatcgagcctaggcctgagtgcactggtcgcctacaggacccgcaacacgacaagttgtgtcgagacccaagctatgcagaccaggggtcgatatgacataaaagtggcaatgatggtgtcagagctccttgccacccacaccgcccgtcataaagagcgcgaccaagaaagcccaggcgaccgagacacatacgaaaaaacacgactttaccaaggtagaacgtctcattttaccatggcacaatagctccttccttgagaagctatgtaagcttctgcttccccttagacctataaaaagggaggaggtcagccagaacacagatacgaacacatgcatacaaacacgtcgaccacaagacgagaagatcccgaaggagtcaaggagcgaaccaccatgacgcccaaggctgagtagagagcactagtcctgtagtctttaggtctagccacacataagagacttgggagctcctctctctctcacacacccgcttgtaacccctactacgagcattgagcaacaaggtgtcgatagcgcgagccaacaaagactggatgtagagacgttcagcccaaaccagtataaatcttacgcccactgagcacaccatctggactgcagcatgccgatgtctgccacaaagaactgcatgtaattgatgtagaagtggtcttaagtgccacatgtgatgagcaaggtgatgtgccccaaaggaaatgtgaacatccctaagataatgccatagaagggcactaaacttgggttaggcaggatacaarccgaaccctaacctgatgaccgaatagataggatttgtggatcgaacctgaaaccggaaaaccgaaaaccgaccatttcggtctattcgggttcgggttcggttaacgggttcaaaatgcccagccctagcagcaatcctggccaaagcgaacatgcttcagtggaccaccagtttttattccagagccagatccatccctgaccagttttgagtaaatgagccggatccaccctatttggcccaggaactaaaacgtgcctgtcttcaataccgaacaaacgaacggggcctgaagcgaaagcaatccttggtcttatggtgggtatttggatgataaatgcagtgtccctccataatcttctgaaactcatcttggttacaggagaaagatcattactgaccctcctgcttgactatcgtcgtgaattgatgatccatcttactccctttaggtccaaattatgaggcattttggacaaagtttgagtcaaacttgaaaactttgactataaataactattttgttatttagttttgaaacctaaaaaatactttcacaaaagtataaatgtattaagagttcatttgtaatttacaaaaaatattggtcaaatctatattttggagacygtatcgttgtcttaaacracttataatttagacctcgagagagtatgtttcttgtgtctgccttta

SEQ ID NO: 136 - DNA, 2979 bp, Zea mays
tatgcaaggtgaataggtgattgtaccattgtgacaggggcagctaagaagaccaaatgaaccattaaagagtccaagtttcagtttattgggtaatataggaaacaacatgtctgaaacaacaactttcagtttgtaccagactcagaggagagaatgtctgaatgccatacttttctatgcatggatacctgcacacaaatattctcactttttacatctagtagtgcacataaattcccatacttaaaaaacaatgagattatcaagcaatgtcatgcaactacctgaatctaataaaatgacattcagaaagggattttgcaacctcaccttcaaggaaacttacacctttatacatacgcttatagttctgtgttgattttggcagaatatcaagtgaaaaaaacaacagcgacaaagatcagataagtcttccactaataagcatttattatagacaaactgagaagctggtaataatgtgattatggaagttgttttcaaacaatagtatagtttgttaaatcggagtaaaatgctaactcaacaacttgatgcaaagacatgaaccattgtaagtatataacagtaatgacctgcaatttctggatgaatatcttattttagcttacctatgagatcaatgggaagtccttgggcacctctctgcgacattgcccttacaacaaccttcttgcaatttgaagtaaccagtggtcgtgctgatgtggctttagaagagatggcacaattagttctggaatagattgctcttccaaatgtatgtcgacccaagcatttgcttgcaggctgggatgcaagggcgtgttgccatcatctacataccggtcgtcgcatatgctctcatcttcctttatgtacaaaaaggagtaggactgcaaaaaatgttttggaaataatatcatggactacacttaaggacatataatgatgtgtattgttttaaggtcaggatgtgtatttattgattgaaaagttttcactgctacagtcaagttcaggtaaacaccatgaatccaaaactaacccaaggttattcacaatctcaatgagacaatgacaacttcaacctggggaatacatattacagcaagccagacctatgtgctattttaattactacatttgtttccttaaatgaaaggtcaacattttcaatagctttggataatgcaataaaaacaatgcccctcgtgaagttactgtcacctaggagaaatagtacagttattagaaggacctaaaaacatggcttgtaaagttaattctaatatacatattcgtataatatagcctaacctttattatcaatatttatccaactataaaggtaatttcaaaaacatggatagaacaaataaaagcctcgaaacttatgctaatgttgtccttagatgggtcactgggtcagaacttttagcagtatgttttgtatggtgcagtgagatgagaaagctccaactaaagtcgcttgactcaatatccatcatggaagccattccaagcctctcccaaaggattcctcctcgcacttggtcacaagggtcaaggtcaatgaacatgtgttgcaggttcttgaatgttctaagtacaaataaacatgtgttgcaggttctgttggcaataattaggtggtgactatcttgtttacctggaattctaagtgaagcatgattctaccttaacaactaagatctcaatctatcttaatctgtccaacccaaccctaaaaaaaaggaatcacatttcagaaaggattgacgagttacaaagcacaatgcaggtccataacctttggttatttccaaaacaaagtcttgcatatatggctagaacagtaatatggaacaacaaaaaagtaagggtgtgaacagagcatggtgccaaagaaatgaggcaatgttgtaatatcaaacagaacaaaaaatatacttaaatgaacaaatatggtacgtgaaaatttagttaagaataatcatataattatatgtagaattattacggttactcaggatgacttcgaaagtatggggatttccaacatgttcgattgtgttgttggtcgctggcccataataactccatcgaaagcttactaaagaattcttatgcatacacatgaaactcaagaatcgtgttatgaccaaaaggttcaggcctgacaactgaaggttcaaaagcaagggcacaaaaattgtgaaaagacaacatgatccttccacatcctaagataagcaaaaaaacatctctacttgggtaattgatttttcagtcggctaaaagtaayagttcgattttgccaacaagatcagctctatgcttgtagagtggaacctgcacagcaacaagtgtccaatgatccgagaataagaattatatgcggtggcatgacatatttatcaaatcatgatgattttagaagaaaagcaacaactcttttttagaagcaccagctttacaagctatagttgacacagccagcatagcatttccaccaagctcagcctgcatttcgcataatatcatatctatttcatttggttaaaatatatttgcctgaaataaaggaacaacaccaagatagaaaaaagtttaggtagtaccggtaagtggaaacacaaattcagtgaaaagaacataattatttccacatagtcaaataaaactgaaataatcagtatcccattgcccctatattgactatacccaytgtaaataattgcttgagcatattgagtcatcaattgtttgtgtacaacatgggtttgacaggaacaaaaagctacaggggagagaaaaaggaaaaggatctccgagtgttccaccttgtggcgtgtcttttccaagcccatgatggcctggtcgatctatgcatgttgttgtgaatccatcccagcgagcacctttgacaccttgtcattgctcacctgcaccgcgtcaatgaataccctgcaa

SEQ ID NO: 137 - DNA, 1084 bp, Zea mays
aattttgaaccctactactgtcacgtcagctaggactaggacatgcataaaaccaacagccatatctagctaaccgttttgacaagtactgaaatgtgcttgcgtgcgcgcttctttacttagacagagaggctaccacagccactttcatttcgagaccccgtaccgccatcactcgacgcgatgtgttttaaatttgcgtaaaatcttgttttatccacacaaaaaaaaatcataccatggcgcacatgtgtgggtccgcgtctgaatttaatgtgctgccacgtacgataagacaggggttgttcttcgccaagtgcatctgaggaaggaactaatcaatatatatagtctcgaaagccctcttgatggcagtataaattgagtgattattagccaagactaggcaaacggttcacatgaaggcctagtggagctttattacattgtgtacctatatgtgtgtttttgccataagctgcacgataggtattgggaaattggtaaggttgctcaattatggcgtactacaagctttagccctaattacgttattgtccttgtccacacgccgacgcacacgtatatgcatatctatctatggcaatcgacggcgtatattgttcctgtcagtgtctagtcggtggcttttgtatccctgccaagtgccatccaatgactttgtgtttgcctgctttcagcttgttggtcgatctggggtttgcggagtggcagtaagacacaatcctttcgtggtgggagactttggatgacttgttgcatcagaaattcgtccccatgttttccttgtgcctttctgttttcccaagtagaggtggtagttcgatgtgttccaattgcactattttttcttggaacgtgaggggtttaaatgaccttgctaaacgtaaaagcgtgagacgaacaatcctctctcctctatatgacaagggcgtctctgcctctctggggctgtgcgtgctatgcgaccgcacaaggtcccccaaatttgcagggctctaattttagtagaggtccatatatatattaaatgaaaaaaatatttcatgtatttttaggccaa

SEQ ID NO: 138 - DNA, 3890 bp, Zea mays
tttaggtgaactatagaatactcaagctatgcatcaagcttggtaccgagctcggatccactagtaacggccgccagtgtgctggaattcgcccttaagacaacgagagagaggaataaggttgggagagtatatatagttgttgggggtagggttttagtttgcgggattcaccaatttgccctttgacgggccgtttgggcctcggccctgtagtgcggtggcaacaggcctacgttctaaattttggcccgcccttcaccggccatcgacgagttcttttttttttaataacccttttctctcctccctttgagaatacggataggatcataggagcactgtatttattggtctatgtgaaaaataaccatcaatctataatggactgcagtctaacatagaaagttagatgtgtgatagacaatgtcacacaagtttgatgtatcgtagcaaaaatattaccttacatcttatttactaatgtcacacaagtttgatgtatcgcataatttttcttacatttgatgaagtgatgaacacatatcaagtgtaatgttatattttgtgtaattgtatggtcaaacaatacatttatttgattgcataggatatctattgttagttgcaggtatattcgatggctcgcacacttagttgattgtgtttctggtgattttttactgattattatttcgatgatattatcatgctagtttagagccatgatatggagtaggcataggcactgttctcgaaaaacatgatttgttcatgtaacctttggcagagctccactccatgattctctagctccgatagtcgattctctaacagagtgataccgagtgattctctaacacaaatgaatttatttgacaaaatcgtttgacaaataggctctgaagtgattcctgataagttagagagtggggagcagggtttctttatctcactctttataaaacactagttgattgaccgtacgttgtgacggctcacaacaatactcacgtaaaatatccaccaaaaatatatcaagatttttattgattgtctccgcataatatttttttatttgactaactgatgttgttgtttactccatccaatataacaacacgaccaatgaaaggagcgattagaagagagttcacaacgattgactaaacggatagatattatataatggcataattccaccatacagagacaaaataagagggtttgtgatctcaagtttctaaaataagtcacatgaactcaaacttataaaaaagatagatcaaaatatagagtggttgctaaagttatgcatcaataaaaactgaatgcgttccatacaaattatggtacttcgtaccaattattaacctttccatttacttttagcgtgacaaatcattgctgcttcatccaattcagcaacttcaaacatcatggagtccattgcaccaatgtggtctcagaaacggcttaatgcatgcaagagccaagaacacaagggacgaacaccctatggtaatgctcgtatggatcaccgaatcctaacacatattttacaggatccatgaaccatcatcagaagaacacaaaccatgtgcagaaaataaataaagtattatcacacccaaattatgttaagtccttagcacaacaaaaaaaactaacacttaaaacaacagaggaacaatataataatttctgcaatgacaaaaggatgtgtgacagatacatagaagcggtacaaataccgagtcgacaccatggtaagggaaaagccatgtagacacgcgatgccgagccatcgaacgagtaccataggcagcaaatcagggacccccatctctcgcctccaccactttcaaggtttcgtagagcaggaagagaacggaagagttgggcatacctgttcgttgtcgaagaaggacacgacgaaggtctgggcatctagagacgacatagctagtatgtcgctagatacatatagggagagagcacgtaaacacagaaagtagcatagccaaagcagctccagaccaagaggcacccacatcagacgtcagtccgagaaggaaaccctagcatataaagttagatatgtgatagctaatgtcacacaagtttgatgtatcacattaaaattttcttacattttatgaagacatatcttgtgtaatgatatatttttgtgtaatcgtgtggtcaaacaatacatgtgattgcatatgatatctattgttagttgcaggtatattcgatggctcgcacacttagttgattgtgttttggtgattttttactgattattctttcgatgatattatcatgctagtttagagccatgatatggagtaggcataggcactattctcgaaaaacatgatctgttcatgtaaccttggttccgcttgtttaaagctaaataaatgacataggcaagcatcctcagggcatgtacaatgtagataccacgacacggttctcaaagtagaagatataattaagacatagttaagtacaaaggagtgtgtctaaagccttgtatcttaattaatactgcatactctttgaattaaatgatgattgatccattgtgtatatgtactatatatacacatatatgttgcatacttgacaaattttgcaatataaaatatacatatatggttgatttaacgtggaccgtaccgttgccatatatgttcaactaaatcatttttgagctcgatgtgctttgagcgatccctaatctctgcatttggtccaaatacatatgcaaaacacggattaacttgattgctcacttcgagtgataaggcgatagatgctccaggattctcattcaaatccaaaggtatcgtagctatttccttttcatcttcaactatcatgtaggatattactcaaatgaaaaggcagagaacctgtaggattgcttaaaagatatagtagtattttgcttagatggcaaacatgtctattcacgatacgaaattcattgttgttgcttaatcaattgcaagaacagatctacgacttaagtaattggaagaatagatatatgggatcaaagaaattagcaaagaatagattattgtgggataagaacagacctgcgggattagttgcaagcacagacctacaggatcaaaggaacttggctgaatctaaggccttgttcgtttccgtcggattgtacccggaattgttccagctaatcaaagtttatataaattagagaagcaatccggtcaggaatcgttccgacccaccaatccggtagaaacgaacaaggcctaagggatttttgcaggacgttacctttcaagcagatccatgaatgtgtagcttgccgaggatgatacacgtgctgggcggcgaatggacggtggacgccgtcggtgaaggacccctgcgcgccgacgggggaggaggttcgagagggttgttgttgccaacagtaaggggaggacatctagaaggaggtaagagaggggtagcggcggtcggatggagaaccggaaagggtggtggtggtggcggctgggtggtgaaggggagtacctgtttctttccgattcatggcaaaaacaaatcgacgggactagtgatgaaaaagtgaccgcaaaacagatgaacgggagcactggatgccaaaaagaccaccgacgttcatacaacgcaacgacatcgtagcttcgccacgagccatgcgcgaggaacggtgcattcgtcaaggatcgagtcttcgaaaattttacacgatatattaaacagcgtagggccggaccacataagggcgaattccagcacactggcggccgttactagtggatccgagctcggtaccaagcttgatgcatagcttgagtattctataggtcacc

SEQ ID NO: 139 - DNA, 3192 bp, Zea mays
  misc_feature (662)..(662): n is a, c, g, or t
  misc_feature (2150)..(2150): n is a, c, g, or t
aagtctgcccaagtctttaggtctactcaccgttggccaattaaccaggcagtggcctccacttgcattgtctccccctttccaaaggaaggaccgacgaatcttatcgatttgcttcctggcccattttgcaagggggaagatggacatgtgataggtcggcatggaggagagcaccgaggtgactagggtgagacgtcctgcccggttgaggagttgtcctttccagcccgttagccgttgtccaatcttttccactaggggttgaatatgaattttttggagaggcctagtatgcagttgaaggccaaggtagcggcaagggaacgatttgcagctacccgggaagggttggagaatgttcgtcaagtccatgttcgcacaattaatcgggtgaaccgagctcttctcaaagttaatgaccagacccgtggcagaaccgagctcttctcaaagaatttgcttgacataatcagggctcacaaacatcgcagcatgtgttacaccattggtatgtaaatagctcagatttgcaaacataggttggaatggttagacatgtgttacaagaaataaaaaatcaatgagacattgagagcgacagatttaagactcttactcattaatgcaatcacgtgatgataaaagggatttacaagctntgagcattcagattacgacatgtgcattaaacatacacgaattctaaacaaattgaattgtaaatggcaatcttagcaggactatttctaaacaaactaaattataaacatcgttaagaagtataacatgggttacaagaaagaaaagatgcataaacttgtcctggttagaggataaaaagcaagaacaatacaccgaaacctgtaaaatttacatcatacaattttcaaaccccctaccttcccaataataagatgctttggtagtcctcgaaacatacaattcacattgaacttagacaaaaaaaaatatctaatttataatggagggagtacatggctacacatggataatgtgataacggaaattgtatctgatggctgttgagcatgtttattacagctgaatttttgaactacagtcaacaatggcagttaggtagactgaacaagttcctaagtaaatctagcatgggaccaaataagtagatgatacaaattgattgtaacatactaataacaagcagtggtcaaagtggacctaaacaatcaattccctgtatattagagaagcttacttttatttggtatctgcactgctatcattgccatcatggtgcaaatacattatgtgcagtaccaatacaaatagacataaaataatttaaattgtgttaattaaaattcatagcttgcattgccattgccgtgatttaggctcttatatgttgaatacaaggtcctctttttcagtcacaggatattttgtctgtagtttcaatgatctattgttcctttagttgtaatatgcaggttaggcttaatgcaaaaaactcttgctgctgatgcttcacatgtttcctctgcaatatattatgttggtgtaaatacattatgtgcagtaccaatacaaatagacataatataactaaaattcatagcttgcattgtcattgttgtgatttaggctcttctgttgatggctttcagataattgggcaacggtgtgtgtatatgttcagattcagaaagtgaggacaatatagcgtttgcagcagtggtaagttcattcttaatacccacaagcgaatacccatttgtagcagtgttaaccatttagctcgaccgaaaagcaatcaacaaggcttgcttgcgaattggcacattgtaattaacattttgcatcattccttcgtcaaaaaagaatgtgagccgtagtggttcgatccctaaggcggcacatttttttgcttttcctccaggtcgtcgccctgtgcagggagggcctgctgatcagagatcaagagggaaagcagaagacacgttgtgccgggaggaaacacacgacgaagtagagacttagaagcaataagctaaatattttgacaactttaattcgagcaggtgtctcaaacaactggttaattcgttttgtgaccaaaagaggaaaaagggccatctaatagttctgtaaaacaagcacttgcntaatctccccctcaactcgccaacatgtgtgtgccttctgcgcttgctatttgcttgggtgcccctcctatgtggttgcacctgcaccctcctgtccatctcctcctcctgctcgtttttttttttgagtttttggaagctaccctcctatctctttccttaaaaccgcaacacctttccctccgcgcccgcacttcacggctgccaagaagtcttcaacgcccgacgcgtggccgcacagggcgaggtctcgctcgatggccaggcttggccttcgtgccaccacccacccacgcttcctcaccaccgtggagatggatgtgtcgctgctgtggtggccctagcttctgcgtgggcccacgtgtagatgccgctggagaagatttaaagggcgaattctgcagatatccatcacactggcggccgctcgagcatgcatctagagggcccaattcgccctatagtgagtcgtattacaattcactggccgtcgttttacaacgtcgtgactgggaaaaccctggcgttacccaacttaatcgccttgcagcacatccccctttcgccagctggcgtaatagcgaagaggcccgcaccgatcgcccttcccaacagttgcgcagcctatacgtacggcagtttaaggtttacacctataaaagagagagccgttatcgtctgtttgtggatgtacagagtgatattattgacacgccggggcgacggatggtgatccccctggccagtgcacgtctgctgtcagataaagtctcccgtgaactttacccggtggtgcatatcggggatgaaagctggcgcatgatgaccaccgatatggccagtgtgccggtctccgttatcggggaagaagtggctgatctcagccaccgcgaaaatgacatcaaaacgccattaaccgatgttctggggaatataaatgtcaagcaatgagattatcaaaaaggatcttccacctatatccttttcacgtataaagtcagtccgcacaaacggtgttgacccccggatgaattgtccgcta

SEQ ID NO: 140 - DNA, 4300 bp, Zea mays
tgttgcggcctcataaaaggaggagtaggccatatctatcctccacaccatactctagtctctagtggagtggtgtgcgtacgtacagtacatcctccaactagccagtcccgtagccatgtgagctttgtcgtcgtggcgcgaagcaaagcagcacccagcaggcagccgccaaacgagagtcacacgcacagctcgcggcacttaacagtgcgcgagaggacctgccgacgccaaacaagagtcgatctgacagtggcctgtgggtggatgtggacagacagacagaccaaggcggttcggcgtcttggaacccgcgccgcgaacacgtacgttacagacggaagcatgctccggtccggccgtccgggtccgggtccgggtccagcggtgatgttgagacagcgagtgcgaggaagaagaaacggtccggaactgcggctgggctcgtttgttctgcccccccccccacccccaggggtcgccgctctggacggaacagcggcacatggatggcgcccgccaagtttccatgcggttgttgttgttcacacgccgtcgtgatcgactcgtcgcttagtactgtcgtcggtgtcagttgcaatacaacccatgtgcagtgggacgagacggaaaaggtgtgtgcgcagcgcagtgctcaagttcagaactcagcgcttgacgctcgagtcagagagattcgggacgctctctcggtagacgactcggtgtcggtgctcagtacccaggtgatccgtgcatgggagtattcggtcgtctgcctgcttgcaagacgccatccacccacccaccggcggactaggcgtttggcgccacctccttgtagttgttggcttggttaattggacgagccgggtgctcgaaggcctgcctgcctcgtcatctttttgctgcgtcatgggaattgacccgcggtgagaccaatccaatccaatgatgcccgccgtgaccgacctcacgccagataccgcgcgtacggagtcagagctggcacagtcgcatgtgcattgacccgacgagaagaagataatcacagatggagcggacacaaagccacagcccacagcggcacagcacgcggctcaagtcagccgttagccggtggcggtacgtgtgtgtcagtgtgggcgggcggcggcgcggtacggccgggacaagcgtaagcgccgccgccgcctgcctgcctgcctgccgcacacgtcgcggagcatctagctagctagctgtgcgtctctgtcaggcagcgagtcggccccgctcgccgcgtcagatcggtggacgaggacgcgtggtgcgctggcgccgcgccgttcgtcgcctgcagcaaaagctactggtgtgggcagttgggcaccgcattcatctatcacgcaccaggttctcaaatggttcgagttgagatttaggggggtgtttggttttagagactaattgttagcccctccaatttattccactctagtcactaaattatcaaatatggaaactaaaatagtgttatagtttctatattttacaatttatagactaaagtgaaataaaatggagggactaaaaatgagtccctagtaaccaaacactaccttaggtggtgttacaaactgtttcacccgatgactgttaaaataaaaaaaaaatcacgcaaggaatagagtatcgtgtgattaaaagctcgagcttattttagaaggtgtgctcttatatgtttacaaatgttttgaactatatatgagtttctgctttctagattcccgagaagccacacatatctccgagggatccaattacaaacaaattcagtaaagatttctaaaaaatatcctagcgctttagtttcatttaagattgaggaataagcacacacattttctttccatagattcataatccccttcaaacaatttaaatctgttacacagatatatggctgtttttatacaagaaacattatatgtaaatgagtttaagaaacctctaactatgcttgaggacaattccctgtgtcttgctctagattacatgcgcttggtcggttgtctattgaaggaaagatgttttaatggctagacatgagagttatttgagccttggaggtagattggtgcttatcaactctagattgagtaatctaatggtttatgatatactccctccgtctcaggatataagacgtaatcactttttattcttgtcccacaatataagacgtgctctctctatgcatacgtatatcgatgcagtggtatagagacaattaaatgcatttttttggtctttgaaccagatgtggttacgccttatatactgggacggagggagtattcaataaaaaatgtaccattcaacttttgcagaattagataactagttcatttagatgccatgacatccaaatgaactagttgtctggttttgcaaaagttaaatgacatttatacaattaatcctttttgatatggcgatatgccttttaccttcgacatctattggaaagatggatagtgctagaaagcgttttttttggaagagggaaatatcatttgattagatggactaagatcactaaacctagctaagaaaaaaaagattaattacatacttgtcaccctgtttttataaaattagataggtaattcattttgatgtcattgagcgacatgaaaataaactactttataactctttaaatttggagtggcatacttctaattaaccccaaaccagatatatttacttaagcagcaggtctacggtgtcggccaatgaaaaatccaccatttttttggcatactagatggtgtggctataggttactttaaagacacacttttctcattttttttaaaaaaaacgaggaccgtgattgttcagttgaagccatgaaatataaaaactagagcctcatttttaggagatggctacgtgaagatttacagagtcagcttagaagattgcaagatatcgttctaaaaaataacgatggccagttggtaattgcgagtgagataaatctggaaatttccctaagaaactgttttgtatgggcaaagttttaatataatctaaaaaggcaaaacaaccgtggagtgaaggtcttcacgtggttggtattacaagatagaagataccctcttcgttttttttatttatcacgttttagtttaaaattaaactagcagatgataaatattcaagaacgaaggtagtacttactattctctctaaagataatctctgtacgaacagtacatgaaattatgttgctgcaggcgttatggtgttattgtttcattgcaccttatttaattgaaggctgagtttgaatcttagtcgttgactctaaggttcatactaatctaatcagtagaacacacatacttttatgttttattaaataaaatctatttatataatatatagaaatagtagcagtgtattatttcatcatgacaaggccacaaaggtgaatcaagcgcctcacgtttttttaaggaatcagcaagcgcctgtgtggtaggttgcagcaagcggctgagccaaagcgggtcatgaatcactgggccgcttgtgctcggctcctctcggctttgtttcgtgggccagaagaccggaccacgggccgacagaagtgtcgcggtaccggccaggcggccagtttcgttccgtttcgtacttcggccgtggatcacgttcacctggttctgtggtcaacttctcgggtaggcatccgagtgaccgcgtcccctggagttcagctcacacggtcacacctcacaccactcaccctgatctgtggccccaaccggaaactgtcacgatcgacgcgacgcgactcgcgccgagtcggtaccacgcatcgtattcgtagagggaaaaaaaaatcaactaggagtaggagggaagccccttccctaccatgacgtctggccactgacgtgcggggtagactcagactgaccccgcacgtcagtgccccatatccctgtccatgcagctgcgccaggcggcaaaccaaccagctctcgtgcgcagaaaatcccgcgccgttccccacgcgtcaccgtggtgcgccgcccccttcctctcccgctcccctccacctcgactaccaaaacactgatccggtcgctgattcgctggtgctgctgcagtttaggctaaacaaatcacccagttgacgaagagggagctgctgccgcggtcctggcccagctcgagagaagtcttttggtcttggcctcttgctgccgctgccccccaatcggcgccgctttgcttc

SEQ ID NO: 141 - DNA, 5100 bp, Zea mays
ttggaattttagaattccaactttgtgtgcgtgtgtgtgtggatgccaactgctgagtcagcagtgttcaaacgacgaggcgctcagagcatcttcaaaagctcctcctctaaatccagtttttttttgaaaaacacaaaaaaaatgtctccaatagtttcctaaaacgctcctaactttttcatatcccttaaaactctcttatagctataaataagaggtttttttgctctctagaaataatatgccgttttaaggggaaatgattaaaatttatcttactaattatttacatgtatcttaaaattgattttgaggagtcgtttctagggatgctcttaggccaggccggtgctcactatccttagtaccgaccaggaccctacggtcgatagctgtccgtacagcctcgcgatggtcggtatccaccgaccgtcgactgccacatatctttttttaattggtctatgtcattttatgaattatgcaactttcatttttacatattacatattttatgtttgacaaattatgtagattttatttatgatttataaactatttaatttgtatttacttttatgaactatattttttaatattgcttagttatatatctagatgtaattgtattttagtaaaatgtgtttcatttcaaataagagtatgtaaaaaggttgatgtagcgctaaggtgactataggctaatagtaaaggttgtgcactattactatgaacttgcggacaatgatagatatagattgagcgatagctgatgtggcggtagatatagactagtggcattagatccgatcttatattgctagagatacacataaacctcacggtcatcggtggcaaattaagttactaccagtaaaatgccaactggagaaggtactcgttgtggtgccattcttgcgccatcctcgatgtcaaagaaataatttcttgcgttgaggatttcgacatcattactacctgctcccacaccatcccatgcggttgcatctccttcatcctctcgaccactggtcgcttcatgatggtggtgccctcttcaccgcctccccatccggccatgttcccatgccgatgctggaccgctccaccacatatccatagcctccggctatccaccgcactttaagtcggacgatggagggagcgcaacaggcgggccacaccagctatttcttttggaaaaaactactttcgggttcgagccctttggtttagcttttgatttttaggggtaaaagccaaaccaaacacaccctaaatcatttacttagtttacgatacagatggcggtgagcttatcatgttattttatggtgataaacaactatgtgtgatgatgagttgctatggaatgatataaacgattagtttatttttagtaaacgacgaagtagttggatctactggagagccagaatttattcaaacctggacaaattaaaaagattaaataatataataaaaatgatcataggaagtatttattaatcacctataaatgtgttactgatatttaacacgaggtagacttatcttcgagttttttatgctctgaaaccgccatgttatgataatattatcaagtattttaaataattttcacttagtgtatcacatcatcaagtgattgaaccattcatctgaaatcttgttgtgcattcacccttaatttagtttcattatagagaaaactctttcaaccaatgctgttgaaaatgacagtaataatgtcaatttctcccccacttagtcatcggtgaatgtgaatttttatgcattaataacttaattagtaacttagttagtaatgtagttcatagcttagttattacataactagttaagtagttagtgacctcttagttaactagtcagtagtaggtaattactttgatagttagtagttagatagctacccaattaatagcggtcactaaaacgatacttccaatagctatgctgccaacaatgatatattcttaattttaggcagacaaatacaaggttcaagtgaaaaaagatgcacttacattgttcttgttaccacactcaaactcaagcaaacctccacgtgcaaggataactagatctccacaatcacgtacacaaagagagttatcaagtcgttcgttggcaaaaaccaaacacatgattataaatgtaaccgatctgcctaaacaactttgcttatacaccaaaatcaaaattatctacctagggttgcaaatttcacataacataagctaactcaacacatataaaatgaggaagagatgaaggataccttgctttgaaaggtctaaggatcaaatccaagcttccaaggttgaatcaatagattagagaaggctggaagaattggggacagggagagggagaaagatgagaaataaatgaggttcgccccggctagtgaactgatgttgattaaattagagcatgacgtcacgagctatgacattgaggtactgccacgtcagagccacaataacgttcactctatttataacataatacctcggtgctttgacctataacgccaagccatataacctcaacaccattggtcacgacgctcacagccgagtccaaatacggtatcaatcccatcaaggatgtaattgtaaaatttttttataaaagagaggtaaaatacataaaataccgagtccattattaacatgtggcaaagactctaagcagactaagttgtgtttgtgcgtttctgtaaaatgcttctgctgctaaaaggcaaacaccaaccaacaaaatgacagaagcacgagaagctaccttttcacgaagtggctgcttttgtatagtatcattttcagttgttttcaccaatcaacttaagactttttgcagcacatagctcacattacccttttgacatcttatggtgtttttttcacaactcagacttgaacaaaacatatacgctaagccgctaagggcctatttggttcctttggactaaaatttagtcgagtttgtagggactaaaagtatttagaacgcattaagtgactcgtaagaagactaaaatatctcttaacaatcttctgtcattagtgtaacagaaataaatgagtggcaaaaggtggaattaatatggtttagtccattttagtcaccctttgaggtactagagactaaagcagtttagttcatgttttagtcccaccgtttatctatttatggactaaatgagactaaaatagaaggactaatctttagtccccaaaccaaacagggcctaagttcactccttagttacaagatcagttgaccaccaagcacagaagtttctgataaagcatcaagaagtggactacggcgggtccaatgacttatgacttctgaacggcggagaacttgaccagaggccacctaaggaaggccttttttgtttatatatatagtggaagagtttctctcaattatttcagtgatacataatttatttatcttcgccagcacctatgtctttagcagattcaaacactattttacattagactatattgtttatatagtgaattttgaaatatacgacgagataaaagattgaatgtgtaagatgtcggacacagtccacttccgccctttctcgcgaactttgtctcctctccgccggctctccctccctggcagaatgtgacatgagaaaaaggtgacgcccccaaagtcaaaggagggggcatgcgttgcgtgcatggcagtagtgtggttgccaaatttttacactttccagtcaaatagttctcagctagacgtacagttagactagatttaattactggagacttctgtggtcgcatttgcatgcatttagttctagaagcgtcaggttagctttacaaaccaagttgtagctaggcttacagttcaaagtgagcgaagccctcacttacgcggcagctgatacagtcaactgaggacgaaggccgggcaagcagaagagggtacctcgtcgtccatgtgcatcacgatctcatcaaggccagatcgaccaccgtatctatccactagctgagaatttgcacccacacacccacccaccacgacgctacaccaaacaacaacccctgcattgtatgcgagtcagcaggtacgtagtactgcatatactgctacacgcattcaataaagggagccaattatctatatatagttttgtaaataaacaaataaaccagaaacagattcgataattaacatatctcgaactgcaggccttccaaactaacgtacgttattagaattgaaatcgcattccaaaaatatggcatagcaactatatataaacgtagactgatccaccacaccgtacccttggtatatatgagagagggttccatgttgtgcgtgttgttcaaacccttcctgacttcactccttggctggcagttgggacgacgacgaccggccgtccatgtggtaaagcatgcatgcaagatggtcattcaaggcaaatacgacgaggaaatgagacgcagacagcagttgtcacacctcgcgcgcgcgtgcagagggtcggcggcgccatactcaggggctaggggtccggatctgaccatgctgggtagaacagtaaggttaggaaaagacactttcatgtcaacgtgaatatggacaaacaagaaaagaagaccttgttgctagaaccaagagcactagcggtttctttctttcagacatttgatctatatggaggacaccatgcatatggatatccatatgagtacagaggagggtgtggataagtaagaggtgaaggaggagaagcgtcaacagtaggagaagcgttggtggtatgatcatcactgagaggagtatctatggatggtcggtagggacacataggaggaggatacgtgtatgcaaggaaaggttgtagactcaaggaacaccgtatctatccactagctgagaatttgcacccacacccacccaccacgacgctacaccaaacaacaaccctcttgcattgtatgcgagtcagcaggtagtagtactgcatatactgctacacgcattcaataaaggaacccaacccaattatctatatac

SEQ ID NO: 142 - DNA, 4700 bp, Zea mays
  misc_feature (4604)..(4653): n is a, c, g, or t
gtctcgcgttcagtttacagtagttcgtcagaatctgttttcagcttcagttttcagcctgttttaggcagtcccgagtctgtccgcctgatgcatgatgtgttcatgcagagcgttagttagactccgcgaatcactagcagatcgtggagtggcacgatttgatgtgcgtgtgtgagttgattaattacggattgtttggtttatagggactaatttttagtccctttattttattttagtttagtttctaaattatcaaatgtggaagctaaaataaatttgtgttgtcctttaatcttttgtctatataattagttttataattatactatattaaatactcgtaatttacatttaaacatttgatatgacatagactttaataaataaaattaaacaccctataaattagttggttgcctaactatcccctaaacgtcctcgcggggcacggtaatgaccatggacaagcatcgctgaagcaaagctccacaaatccctttagacttcaaaaaaaaatcctaaattatgtcatcacgcattctatggctgcttgaaacggtaggatcacagtttaaaaatgctaggtgtatttgctgagatgcagtacaataccgcaacattgttcatgcttgaaatggtaggatcacaatgcatcggtagcctaatgccacagcattgttcataatccgagagggtggcagagaaaatatcttacgggaggatgacgggcgcccagcccacgagaacgcgacgtcccccctccgccgcggtgccacgcctggcgtcgccctcaccctcgcccagcaccactccaccagcgagagccgccgcttccctcccccagaatagcagaggcgggccatgtttagccgcggcggcgagaggggcatagtgcagggtcgatcggggctcggaggcccccgagacgcggcgggttactcatagtgattaaccggatcatagggtctgcatgagcatgttaggtgacaaaggatcactgaattccgatatgtttgttccttgaacgagatttacagtttttttagaaacatactgtgttgagctcaatagatcccaacacgcacttagggtccgtttggtacagttccagttcctgattctttagctctagatcctaatccttctaaggagctgatccttctgattcctggagaatcggaatcattttttaaaccgtttggcaagtaaaatgattcttgtctagttgacatctttagaagaattttctatttcgtcttgcatacaccaaacgtgcgttcaacaaatcaattacaagcaataatacaaattgcgggtaattttgggtaaactttgaggggaggttcatatttggttggttgaggagctgttttgagggagggtggagcagtttttttagctcccacatttctataaaaaacgactcccaatccttcctgctccacgtgagaatcagttcacaaaacacttgtttggcacggctgctctggatctccgtctaggatcaggagctggagctgtgccaaacagacccttagactgtgttgagcggttccctctaaatttctccccctatatctcactcacgtgccacgtcagcgttctctttccccctatatctccacgctctacaacggttccccctatatcaaacctctataccccaccacaccaatattttatactttcgtcatcaactaactcaactaccatccaatatttgttttatttttatttgctctatgaaatagcaaacttagtaattagcaaacttcgtaattagtatacttagcaaacttcgtaatatttgttttaacgtctgttggcacctttttggggcgctaatcactcaacaagaaccagcggcggtgctctctggtcagacgcggacggtccgcggcacaggaccggacggtccgcgacctggcgcgaggctagggttccctgcctgacggccggacgatccgcgccctagggccggacggtccgcgatctggcgacagggtcgccttcttcctccttgctggaatctagatctcgtcccctaggggaaaaagatcttaaggtgctctgggtcgacaggtcacccagggcgtccccagacgacgtggagtcgcataggaattaagagatcaattcgaggaagaggtcttggatggacaactagatcttaccccccgggaggggtgagatcctggggtcgtcttgggatcggcaggccaaccaagacggatctagacgacgtagagtcgaatagggatggaggtggatatgtgaaagactacaactagaactatgctacatctactcctaaggtaggaaaagtaaataaggtaattggttcaattggaatgtgttcgggggttctcaatcggtcgtacccctttatatttataggggaggaggtctggaccttttcctaagagatagccaacaaactcccacgtgattagatggataaccacgcacgagataaggataaatatccgacttaatctaatcccgggacacgcggaccgtccgagcccaagggccggaccgtccgctcattttggtgcccaacatatgcccccctgccttttggtggagcttggcgaaccaaaagcatcagtgaaaatttcggaaataattgacctcatgagcttttgttcccgatttaaggactcagctcgatgcaagtcatcggctcttgcgatcagataatataaataattgatggaactttaatgcatagaggccgttttggatcgcatcctcttcagccatgtctacctgatcaacctgtcaatacgcaaaaacttgtggtgcccccagcccaaataagcaaacgtattgggccagtaatacgaattcatcgtcgtaccaccccacacatgagcaggacaacacatcggcgatggatagaacgggacgcaccatgctatccctggaggaggatgacaaggcgatcttggttgtgctaccttttgggtccgtttagtcggcttttgctttcgcacagaccgcccttttgacttcgtctgctttattggccggttgtgtggaacgaccttcttcgtatatttggcaagcaactgaccaaaagtagggccgactctactgagtcgtccaaacgtcttaatagtattttgtttcctaacacttgttttggaaccttgtggtccggtggtctgaggttgctgcttctgactgtctgcggactgtccgaccattatagtcggaccgtctgctactgtctccgactgttcggccttagtacccggatcgtctagcgtacgcaggacaggtgaccgtggtcgggtgtccgatcgtgcttgccccccggtctttcttttgtccggagtcttccgagtaaccattatgcgtgacatatttggtgtacggggatcaccaatgacgatatttttatctttgcttttatcgcccgcacaaggccaaactacgacttttttgcttgtcggctctaatgtggtggcagggacaggtggcctgtcaatcctcacctccttttgaaacctcaatcggccttcatttatagccgattgtatttgccgacgaaagacaacacaatcattggtgttgtaacacccctggtgttactgtaactaaaacttgagcatggcatcataagcattggcattgcatatgtttgatacacctagagtgcattcactaggcaaaaatttcaaacaagttgtattgttttaatgatttgcaaataggaccctggataggaagctttaaccctaaatagggattaaaggggtaaaacttaacctaagatgagaaaacctaaaagctttagggtaaaagtcataaaatgaccccaaaaataaagttgaatcacatttatacccctgggataccagaaaccctaattggagccctggaaaaccctgaaaccaaactctaggggcttatgtgcaaaagtgatgaaactttggactaaagtgtaaaaactaccatgtttaaacatataaagtcatttggttcacaaatatgtggccttgaaagccaaaccctaagttttggacttaaatgcaaaatggacctcaattgagttctattctaagtctgaaaatcatagaattggctcaactttggagctttgcatctttcaaattataggggttttgccctaggtcaccacatcaaaattgtagcccaattataggagaacaactttgctaaagagtgtgagctcagttgttaagaaaaatttggagataatcatgctcaaactttggctgtcaggctggattcattctgaaattcagcttttcagtgtaacagggtcaactttgagtatgaattcaaccttgatccagtactcaaataagtttaaaccctatagtcgagttgtagctggtatgtagcactacaactttgatgcagagacttggacctgttgccacatggaattaagagaaattggagctccaaagtactctgtcagctgctctgaattggtgttcgccattgtacagtagctgaaacagataaggtcgccagcgcggctgtctcagacgccggtggctttccgccgtgattcacgtcgccggcgtcacgatcggccgagacgattctttagatcggannnnnnnnnnnnnnnnnnnnnnnnnnnnnnnnnnnnnnnnnnnnnnnnnngtcggatgaatcagcttgattcgtatctttcaattataggggttttg

SEQ ID NO: 143 - DNA, 3000 bp, Zea mays
cctctcttggacggtcttctggtggcagtctaccctgaagtgcgagaggtaccacttatccgccaccttgagcacctgatccttttgtcggtgggcctccttgtctattttcttcatgtcatcttctaatctcttatgctcagcggccgataaattagtcagccttgtgttgctgtttggagaagcaccgttgagatatttagaatcggccatgtaagcatgattttataaatatgcaacttcttccccagcggagtcgccaaaaagtatgttggcacctttttggggcgccaatcactcaacaaaaaccagcggcggtgctctctggtcaggcgcggacggtccgcggcacaggaccggacggtccgcgacctggcgcgaggctagggttccctgcctgacgaccggacggtccgcgccctagggccggacggtccacgacctggcgacagggtcgccttcctcctccttgctggaatctagatctcgtcccctaggggaaaaagatcttaaggtgctctgggtcgacaggtcacccagggcgtccccagacgacgtggagtcgcctaggaattaagagatcaattcgaggaagaggtcttggatggacaactagatcttgcccctcgggaggggtgagatcctggggtcgtcttgggatcggcaggccacccaagacggatctagacgacgtagagtcgaatagggatggaggtggatatgtggaagactacaactagaactatgctacatctactcctaaggcaggaaaagtaaataaggtaattggttcgattggaatgtgttcgggggttctcaatcggccgtacccctttatatttataggggagaaggtctggaccttttcctaagagatagccaacaaactcccacgtgattagatggataaccacgcacgagataaggataaatatccgagttaatctaatcccgggacacgcggaccgtccgagcccaagggccggaccgtctgctcattttggtgcccaacaacgtccaattttcttgctctagcacccataacatgatagattcctgaggggcagaatatataatttctttatctccaagactccaaacagctaagaatcacaaatccagtttcctgccactaacggacaactcttaaagaagtttcaagctagttttcaacttaactttcagtaaaattttccaaaattcaagtagatttccatagaaatctgaaaacaacattttggtccaaatccataccgaaaatgttcttcttaatcttctacttctggtattccctaagaattagctgtatggtgtcacattctgacatgtattctatatagttaaaaaatgttccttattacaaacacaccaaagctgtaatatccctaaagttgtcatctctaggtaaaaatcaactgatttcacgtttgaattaacaacactaatttatcatgacaaggtcctggcttaatgcctttgtatggcaagggctcacctccagtaataagcaggtagtggttgctacgtgtgcaatttatcatatcctgatacaaaagacaaaaccacatagtagcgtaacttcatcagccaacattcttttgggcttctggctgtgaaaatttagatacggtaggtttttgttccaacaatttatgggaaacaaatacaaagatcaacattaagtcgtgcagtttaccattgttaaacaggcccaaagtgattatatatgcaatacaaatttctggattcttttgcaaattctgcacaaaatatgtgcaggactatttggttgtgaactctcaagagcctcgccaaagttttggaatagccaaaaaaacaaacaacaacaacatttaagcaagagaaagtagaaaacactcgttgtttagattggccatacatgatataactggattttcgttgttagagttgccaattagtgttactgaatttgcagtgctattagtttggcttgatatagtagaagaccaaacaggatgcatcaataatctcattatgggctatggccactccaggatacctttgcatccgaccacaaaatgaacatatcgagccaacaaacgcaccacaccacagcaggtacaactcaaactaaatggacaagaggaaagcataaaccattcacctgtttgaacagctcaatccccttccctatggacactagatccaggttgtcgtcgaagcaatacacgtgcacgcggctcccagagctgccggcgtcaaatatgacggcatacttgttcagtccgtcctcgacggcccggggtccccacctccgaccaccaacggcgaggagcacaccccctgaggcggtggccggcgcacgcggcatgagaaggcgcacgcggcatgagaaggagcacgaacgagatgaggaccaccgacgagagcaacaccatcagcacccgacggtaccggtgcacgcggtcggccaccgcctccgtttgctgctgctgccgtgctccggcacccgagtagcggcgaatcctcgcggccaccactgtggctgccgcggcatccgccgcgacatcgtcagcggggagcagatcgaccgccgagggcgtacggtagcggatgcgaccgttggtcggcgatggtttcaccgcctcctgctgcggcggctccagcgtgtcggtgcgtgcggcccggagcaagaaaatcgaatcgagggagagggcggcgcgacgggtaccttctccggcgggccgaccgtcgcacttggttcgcctctaagaccgtcttcggagtttttcgaacccgcgatgtgtgggcgaaagaagcggctgcgggggaggaatgcggcgtagcgtggccctccatttagcgtgagagagaaagaatcgggaaggaagaggaggagaaggaggacgccggtgaaggggaaggaggcgcactgtagcccctatatcggctaaagtgttaggggagggggagggctgcgatgaccgttgaagacagtcttaggagctgttcatttga

SEQ ID NO: 144 - DNA, 2600 bp, Zea mays
tgacatattgaaaaacgacgtcattgcagatcccagatgacttgactttgaacagactagttgaagaacatgaatcctttcctatattactttgctactaccttttatagtacatgaaagaagaaaagattatatattggtttgactatagggcctggtcagctgtggtctaagtccaacaaccccaatctatcttggtcatagcgccatggctttgatcgtactatagtcctgttgcaggggcagaggtgtatctataataggggtacgttgtcatgttgtatcgttgaacactagatttcatgacgttagtcacaacgtagtaatcgatttagtaaactatactttataatacttcatcgtacactagtgtgtccatgtgtggctataggagcgatgacacagtatcggatagtggtctttagtgcgtctgctgcctaagtttacagtgtctcaggtctagaattttaggtccttttctcatagggtctgttcggttaggggtaaccgaataaagtcttagagccggttcgattattcaggaatctagtccaggaagcatttcagctggaataattatataatttgtagtataacaagttacttggaatagttactagtcttattccagtctaatcgaacggggccttaaggtgcttgagatcgaggtcattaggatggtggacctataactttgccaaagcaaatgcaatgcaaggtatatcaccaggagatgtgcctcgtataatttgaaggtacattcggtgatacgccctttctcagacgtcgacagcatgcatatctaactctgtatgcaaaaaaaaaagacatatgaacgaagaattcgatcagcacacgcatgtttaagcctgcaccagccagccagccagtggctcagatcttgagacgttgaatctatccagtcaaagctggatgatgcatatggatgggatttggtcgcagtacaccttgtcggccggaaggaaagctagctctgggacagtgaggaggggctagctgaggcctctatcgggcgaaaaggagacgagcactgcccttcgccgctgtcagcgcagcggtggagcacgatcgctttcgagatgagaatgagatagacgacgacaactgcatgcgttgatgtgccatccgactgtcactcgcggctaataattacatccatctctgcaccggccgggccgggccggggtggtttcagtttcatccacacaaacaaaccacacactgcagatccaccggcatgtgtagttgcatttcattgcatatcaaagcttgctgaagattgattgatgctggcgtggtgtagtccatgcgttgccgacagcgtgggtcgtcgacggatcggatgatctacactgcatccactccacgcctttaatttgcggctagctccacttggcgggtccttgatttggctttagaagagtcagtgcctgtctgtgctccaactagcttattcaagcacatgaaacaaatgcgcgcgcgcggcagaaatctgtacagcgcggccaggctcgatctatctgtgtggatggatgatcgagctgattagtgcgcgacgatgcttaacgagcaatccagatcgatctccagactagtgtcgtcaattcgtcatgctatattattggcaattggcattgtgcttttcaggaggagatcttgcattgtgaagctactatcaggctttgaccaaatgctgcaaattaagccagaggtcgttagtgatgaggcctgagggggtgcagtggtgtcactgtggcctgtcggggtagtgcagtggtgccggtccacatgtcggccgctgccgcagtctgattactatttgtcaatggccatgcatgcgcctttgttaaaaagagagagagacatgcgcaatctgattactatttgtcaaagtttcctccacactaatttttttttacctccacaccatctctctagctcaccatgatatatacaagaattcagtcaggctgtggtatgtggagcatgcatggaaaccaaagtctcatgatgggagcgacatgattagctccaagtttagtggacaatctcccggtcaacccctggcctacactaaaaaaacagaacgccctgcatctagtctactagagaggaattggaataaatatttagcggcagattgcattccagccacacgtgagtcttttctctctctatatatattaccctggccacatagtgattttctagcatgatctagtagtctaacctctgatggggacaagcatatatatgagtagtaaggtggcgcctacgccagcgctagttattaatgggatgaattcagagaatcagctagcacgtagtagccatttgttttaattaaatgcgagaatcagctatccatgacaggagcatcaggcaaagcacatttgggaccagggtgtgtggcagtggaagacagtaattaacgagagttaccttgttgctcttgcatccaacacccactggcttatcctagctagtgcgcttcgtatcaatccatcatgaaaacctagccttgacagccagggccaagactgggctgcctgccacgccataacccattaatctcatag

SEQ ID NO: 145 - DNA, 3397 bp, Zea mays
  misc_feature (1733)..(1782): n is a, c, g, or t
tggaacaaggacgaatcatatgtttgaagtcccagctgaaaaggctgcagtcagtcttagattcctcaaatgggtctcctgcagagctttttggaacgaaggtattcccataactaggcttcacaaaattgttatcccgaacgaagtaattgtatttctagtattataccagccacacctttagacttctagtatcctgattgaatttaaccattaacactgtaatggtaagcgataagcttcctaacccgacgtgctcgcgccggcccgtgcgccgcctccccatcctcaactcctccagatcagagcagatcatatggcgcctccatctcccctgctagtgcgcggtggacggcagtacggcacgctcggtctcggccacggcatgttcttcgaggcgttcgccgtcgccgccgatatctccttcgcgcacatgctcacctgaccaccgtcgtctggaatgcgatgcggctcgctggcgttggaagcgagaggcggctccacgaggccatccacatcatcgtcgacgagcacgtcacggcgagcatggaatcagaggagcggtcatgcgacgttagcaacagcggctgctgcgatgagcagcacctgttatcacggtggtcacgcggcgtcggtgacggcggctgctgcgatgagcagcatctgttgtcactgttcgcggcggcgatggaagaagagggggcgagctcgacgctatgtgtctggttaccggtggcgaagcagcggttcctgtgggacatcgtcgttccacagctgttggcttgttgctgccggggaacgacgaagcgttcgcgggtacgccgggagtagacgcggagccgcagcggggaggcacgacgcggcggagctgtgcagtgcaggagctgcgccgaggacgaagctgcgagtcaaaggcttggactggcagcgtttccggttaatagctgtctacgatggtaaacgtgggaacgatagcaaaaaaacaaacatcggactgttatagtactaggaatccaattgcaagattcggtatactaattttacgaagcccgtttatctggataccagcaatccaaaaggctctctcctgcagctggttttgtccacatggcaacctcctgcctgtcgactcctggttccaagatatacacaagcgaggaccaaatggtaatggtagcgaccatttgcctgacgaacccttagcggaggaaaaggagtcggaggttctcgcgttgtgagttctcaggagctgctgcccttcacatctacaaatgtgctgccattggtctgaacaaggggagatgagatgcaggataacagacgtgatttggaggttgctcattcagatctctatccctccgttttttatttttcgtgatttagtttaaaaataaattaggaaacgataaatatttaaaaacgagcgacaaatattaaagaactgaggtaatacgttcgtatgcgagtttctagagagtgtggctggcttcagtcgtactcgtacatggtcaacatagtttagttatcaacggtgggtgctacgtagattcacatcttgcctgaaatttatttgtttgggacttgtgagccgctagttactgcgggcttgatagacaacgctaaacttcagttgcatttcaggattttagttcgttgtagggggaatgagctcatggatattgtggtcgctcgctgcttaacgaatcaagctgatctcgatagtgctaaaaagnnnnnnnnnnnnnnnnnnnnnnnnnnnnnnnnnnnnnnnnnnnnnnnnnnatcattatgacttctaaatatcatttacgtttaaccactctgaacctcactgtggtgtctgaatacttattaaacgacagccagagccaccacctatgagaggctgaaagcaacggtgccgccggagatggagacgaaaaaggaggcggcagcggcgaggcaggcgaaggagtccctggagctggcgttccagatgtcccagatcctcgaaaccggcctcgaccgccacaccctgtcgctgctcatggcgctctgcgaccgcggcgccaaccccgaggccctggccgccctcgtccgcgaactctcctccactgctcccccaaccgccgccgaggctccctcccccgtgagcaacgccgccgcggggccggccccggcaacagcgtccatgttctcctccggccttcgccgtccctagggtttgtgatgtcccttttttcgccggtgagactgcttgccagttagtcgactagatcccgcagtatgcactcagccgctgtgagtgcctgaatgtagtatgttcttatgttttgactaaatttgtgcctcacaagaagataatggttcaaccaaatgccatatatcacgttactgcgtagatgtgctgctacctgcatttggcatcaagattcacattataatgtctatgtttgggttataatattaatttgcagccaggtgtttctacaaatagtcaatctaggcatgggcatatgaactgtgggttggttattctttctatgcaacatcaacggttgtggaactttctatctcttgttctctctggctctgccacccttttagctacaccttgtcgggtagtggtattgccatgatatagatttgttgcagttgctagtagattaatgggatgcttgttgcttggttgacgaatgggttagtacatcatatttccactcctaacttttttgtttgatttgtggaatggaatggattgatccaccaccacatcattccttataagctattagtataaccgcatgccactaaaattcatgggatgaacacatgatggaccacctcgcctgtgtccggtgtccccctccccccgactttagtgtccataggattttgtggcatccctttcttccccagtgagattgcttatcatcagccaaagtgtcaaactagatcccacaatatgcatttagctgctgtgaatgactgaatgtagtgtttccttctgttgattaattttgcatcttggcttatgattcacacttcacaagcagataatacatggacttgtgtagtcctagatgagttgggtcagacacaatgtgcataggttacatgactgcaaacatgtgacgcgtcctgcatttggcatcaagattcagagtataatctcttcttgggtcacacaattaatttgcaatctggcatttctacaaataaagaatctaggtatgggcatgtgaactgtggggttggttattgtttctatgaaatgggaatagttatggtagtatgtatctcttgttctatatggctgtaccttcttgactagtggtattgccatggcataggtgtgttgcagcaaactattagattaatgggcgattcggttccgcagctcttttctctccttctc

SEQ ID NO: 146 - DNA, 3400 bp, Zea mays
cgcttctcttcataattaaaaattctgaacaagaacactatcaattagtaaaacctccaagacaacagacaagtagataatgagcaaaacagcgaacaaaaaaatcaaaaccagtagacgaagaacctacgagaggtcatgagtatacctaataatctgatatatattgaagatgatataatctgatttagagaaggactgaagggtggcagaggcagggcattagggcgagggctctcagtttccggcgcgcgcggcgggctacagacctgcagcaaggcagtaagctaattacgtttcactaattgggctacgtgctacggacctgcgcgcgtcgggccaaggagcgctctctgctgcatcatgggtgatgggccttagcgtccactcgtcgtctcgtccaggtatatttttctttctttttccttttttagtttctacatacaacaatattattatataatatgtaaatattcactgattttgcaggatatgccggtgcatacccgacataccctatgtgtccgccactggaagcgggtactctcaaagttggacacaaattatctacaaagttcttcccaatattatatggaggcctcagggaggctcataagtcattgttgggcagaaccaatcaaggcatcatgtaagtagtttgccatcacctttccatccccgcacaatggtgaggatggcagtgacgaagatctgtaataactcggtgggattgatagtcccatcatacttcttgcaaaggttgggtgaaattctatagacatggtgcctattagaacactagggtgagcgtcatatagccagcaccggtgggatggaccacctaaccaacatggcctataggtggcgccgactccatagagttgaaaggacctagatagctagatggagtgaccgatcaataaaaatattacataaaccatacaatatcaggtagagccaacatatatgaacatggggaaacaattactttctatagttttgttctaggttatttcttttgtcaaacttggagtttgtgaaagatatgtatgaggaagacaaggtactcaataataaagggaaataatattaacactagctacagaatgagtagatgaagtaatatgaaccaacaagtaaatgtaattgcaatatagtttaaagtgcaaaccacgtgggcaagagatgaaacaataattatctgtaaggtttagattcttactagcatcctacgtccccgttgtggcgagtctaaactaggtgattcacgcactatctgacataacaaacagaacacataaagggcactacaagaatcaagctagggatacactcctacaagccattattccactatagttgatatttgtgaatctcccacaaggaatgagcacaagagtccctcgcaagaatgatcaagtcgacaacaaacaacaaagtcgctcaacgatatcatgcttccttcaagctatctaggtgacaacaaccaccaagattaacaagaatattgtagttcaatatgatcactagtgccactagatataacaactcaatgcaaattattagagatcactctcaaagtcactttggatgaaacactatcactagtggtgagtgcgagatgttttcttaggcttactaggttgtatttcaagttgggaaaccagaatatccacccccaaacctaaccaagctctatttataaggaatatatattgtgcacaagaccaccgttgtgcacatatgcacaaactcaatctaaacccttcgtttaatgatctttagttgacgtgaaaacatcttctgcactctcctcccctaacctagctacatatgtgcaaaaaaaccatgctcgatcgaagattgttagatgaagggtccagattgagtttgtgcacatgtgccgaaggtggtcttgtgcatagatatgttgccctatttataaggtcccagggggaaactagccattggacttttactatgttgattttagggttgttggacgatctaatacccaccaacggaccatgtcgctaggttccgacgactttagaacatgccacatattagctatttcaatgttactattgtcgccctgatgattgctatagtatatcgttcgacaccctctatccgagaaccatcgaaccaaagtatctagagtccgatgcccttcgtaaaaagaccagagatctactggtagtgtctgaataatatgatgtatgtttttagaccaattcataggatatgatggttgtgttcccattcaactagtatgcctaatagtgggtacattcaatgtatagtgcactcattattcgattcgatgcacatgtttttcaattgtcaaactaattcttcagggtccaatgctctactgaaaatgaattgagagcatttgtgtcatggtttttataggtaccctatacatgaggtacccactcttgctaggtcaagataagaccccaatggatgccattaagggttcatgggtggccagcccaacacgggggtaaggcctactgtatgaagtcgtggcccagcctggactcgtttcctgggctagaccgccaccaccacaagcacccataaaaggaggaatcaacaacttcagctatagatatggattcttgcgagtggaactcggacctcctcatcggacccctttgagaaaggggtacaaagggtctccacgtccatgggaagaagacactctttggctgcagcactgaacctccgggatggttcccgaccagttatatgtcatccggacctcaagccaagtggggtccggtgccgccatgtgtctggaccgatgcagttggatccaggccccctcgggcacggttcggggccctagccagagagggcctgggaatgctgtgtccccacatattcctgggcctgccccctagtccaagacagaggtctagtgccaacgagtggccaaacatgtctagcgtaagccaccggacagtgcctgatgtatgcctctgacatggggcccactagcattaggtacggatgggatgcatacttacccgcgccagcggcgtgtagcatatcccctgcattaaatacgtgcgacatgccaagcctgcaacttgcgaattttactgttacccgaatgttacctaggcaagactattgacccaatgcgccgcttaggcgcctttatttatgacttcattgctccttgtgcgttaccgaggaatgaagagacgtgtggaggagacgggacaatactgtccacccctacgcacggcagagtttcagactatgccacaacctactccattagctacgcctcgaccttgattagaagggatgagaggataggatatcaggagccagcacaacgaccaagaggagatacacgcttaggaagatctagtgtcac

SEQ ID NO: 147 - DNA, 3600 bp, Zea mays
caagtcaattttggggtcccattttacaaaaaaaaagagttttggcctcatgcttataatcagttttggtaaatcatagttatcaatctcgttcatcaattaaaatcagcgacaaagagtatatatgttctatatgaccatatatacctttgtatgcgtgatagacaatgaccttttttaatagaatcgatagagcccagcacaccagtttagttcatgaattaaaatttgataccagatgttaagaaaccctataaaaggttacgtcggctagtatcaaacatatgcctgagtcactctacctttctatataataaatttatgcccttataatgataacgagaagaaaatgagaaaaaagaataaaatatttcttgtttaccgataaggggaaaaaatagtctttgacatgtcttcattattgacggaacattcaaaagccggatcgacatcaagaaatgtttggttccagccaactaaattttagtttatcacatcaaacgtatattcgaataataattacagatattaaatgcagtctaattataaaactaactatacaaataaaaactaaaagacaagcctaatcaagccattatttaatattcataattattttaaatacttgatgtgacagttcggaacgaaacatctccttactggctaacaaataacaaccaacccaccataaaagagcatccacgcgtaaagatgcacggatcgggagcagctagcgcggggaagctttgcttggctgccgcacgcacgagttcgcaaccaatccatcgggactcagaaaatgggatctgggtcggcatatgctccagctctacgacgatccttcgtactagcaatcgtcgtcgccggtaacaaacatctccagacactagggatctgatcggaagggggaaactgtaataaaaaggatttaaaaaaacgctactggaccccttacacgactgtaccgaagttattggtcgcgtacaaaaatatcccgacaagaaagagcatcgcaatcaggcgtctgcgtgtgccgatgggtctgcagcaacgatcgggccccgcctcgtgactggccaatcaggcatcaatggtcgatcgtctaaactggggaatctcacgccttcatttcaaaggaaggccatataaaaagcaattttcctagtacgcccatttccaaattgtaacaggatttaattttagtttttattacatactatctctgagaagaatacatacttttaatatcaaattgatttataaaacaatccctatgtgcactatagatagaccgtacgtagcaaataaaagcatatccacgtgaaacacgccgaccaaaaaattacgaggagaaattcctcgcatcatctcacagcaaggatcactcgagactactttgtcgttaaattccgtagatgtcatagtacaaaccaactcggcaatcggtcgtgtgactgctcccaaaaactagatctatctcaatgtgtgctacctctttagtagagcaagattttggagacactgctctccctatcgtcatcatcatgccgatgttagaggtggaagcatcaaagggcgcgcgacatcgagagctctctcgagattggttgtttcttgtaattttagagaaaatgaactttctattatataggggggacaacctttgtgattacccattacctttcattataggactaaacttcccatgatttattgactcatacacgaatggatatttgagatttattctatgaattacttggaggaatgtgggggccaaagaccagataatttcaacaatcctccaccaaatctcgaaagcaacacttaatcggctctcaagaagtcctcaagtaccgtttggcatatcaactttatgatggagactgtttatctttcatgagctttttagagaatttccacaattcacagatcacgaccaacgtcaacccataccctgcaggacgatatctcatatataagccccaaacacattaagacaaaaaacattctaccttacagaccatagagtattacatcttcactagatagtgtaacataatgtgtactcttgttacatatacaagttttttctagagtcccaacacgttggatctcctatcataacgtttggtttgctaccgtgcgtaatccaggtgggtctcaaactcatctccttaatgcattatctatcatgtttcaagataaacctttcgtaaatggatctgctggatttttagccatgtttacataattaggaactgtcaatccagaggtcatgcaacatcgatgagtctactgagattgattatttctcgtatattttggggagaatgtcatcttattatatctaggagtatgctctcgtgattactgaaatgttttggtggttagatgctcaacacatattgttttggttgatataagctaagtgtcaagagatgcaaatggaaaaaagcaaggtatgactctagctttagtaaattgtttttggtactaacattattctactaagtgcaaagaaccttgtcaaatcgagaaaatcggattggagaagtttggctaagtccagccaaacttgcaccagctcgcggtgcaccagactgtgtctggtgcccaggctggcgctccggtgaactagccgatctcgggaaaatctgagggcgtcgcggctataattcactggactgtccggtgagccagccgcgcccacgccaacggtcggccgcgcgatcagcgggcgacacgtgggcttcgccaacggtcaccaggtcgcaccagactgtccggtatgccacgggggtcggtggctgcaacagtcaacttcgtcagaaaaggaaggaaatcacgcactattcactgtccggtgcgcccatagacaccaggcaactaaagctttccaaatagagttcaaacggatcctagctaccttggggctataaaagggactcataggcgcatggagcagtacaccaagcacccattgaacattctaagacgccaagacttcgcatacacgtatttggttcatcatgatagtgaatcgagcacttctttgagttgtgactatgatgtgatgcttttgtgtgctcgttcttgtcttgtgtgcgtgttgttgctacactctcgctcttgtgtgttttgctattcccccctttactcttgtgctcattcgagatcatttgtgtaaggtgtgagagactccgaagtgtggagattcctcacaacggtatattattgagataaatagaatcatggtattcaagttgatttttggatcacttgagaggggttgagtgcaaccctcgtccattgggacgccacaacgtggagtagccaactattctacttaatcgaaccacgggataaaatcgttgtgtcaaatgtctttctgagcaagtagatccaacgggagagtgcagagagtgtttgcaaagttccacggggaatgacaatagctctgttaatctggcctctcaagggcactgtacggtggtatttataggcacccgagtgaccaccgtcctctggtaagaacgtttatgccctcgggtacccggactatccccagaatattctcgcaaggggaggttacagacc

SEQ ID NO: 148 - DNA, 4000 bp, Zea mays
tgcctagtaattgatgccattgtgtaccaagggccacaacacatcaacactcatcacaaagaagcaaatcagtcataacataaagacaaacaacacaagcatactacaacaaacatcgcatttctataagttccttttaattagatggtggtctttcttgaaaagggaataactactctccaaggtcgttgaaagacgaggagaagaacaagacgtacgggacaggagcatgagcacaacaaaggatgtagttgaagcaagacttgcaaagcggcaaaggaggggaacaaccatggacgggataggtaaaacaacactctcaaactgaagtgggagagagaaggctttaaaatgcaggtacaagataagcatcaatgtaaatatcaagagatgacaagggttaaaggtaatagcagataaacacacgacaaaggatgcagttgagataaaacttgcaaggcgacaaaagggaaaagcaatcaagggatagataggtaaaacaccactctcgaactgggttggaaagaggaggctctaaagggtaagttgaaactaagcatctaggtaaatacataaatatcacaagggtcaaaggcaatgacagacaagggtgtaagagaaaagataaaggcacagaagaaccaagggtacaagtacaacaaaaaatggagttaagacaaggcttgcacatgggcaaagaagaggatacagccaagggtgagataagtaaaacaccattctcaaatcgagatgggagagaggagatttttaaatagcaggcatattgttgtcaagtactcgggaaccaggtacccaaaatagaccattcaaaaacgaccaaatccactgaccaactctgtgaggcagaccggatgaccaactctcagaccagatgaccaactctccgatgatgaccaagtctccaatgatgaccaactctctagtgatgaccaactatcggatgatgaccaactttgccgaccaactctgcgagacagaccgaatgaccaactattcgatgatgaccaactctccggctatgaccaactctctgatgatgaccaactttctagtgatgaccaactccgccgaccaactctacgagacagaccgaatgaccaactcttcgatgatgaccaactctcatatgatgaccaactcttcgatgatgaccaactctctctggtgatgaccaactcttcgatgatgaccaattctcggatgatgaccaactctgatgaccaactctccaccaatcagcttcggtcgaccaatcctccgtcgagcaacccagcgaggcagcgatctaagtccagcgttactaatccatgtcagctatgatgggacacatcaccatcaagacatgtctggatatgcgcacatcacaccgaatgggcaccaggatctctacagtgacccatacatcggaaggacgggataacacgctatatcgagcgtgcgcctgcacgagctggcaggtggcgaagggcccatgacgacaggagaagccatgccccatacgacaacactttgatattgattcgtggaacccattatgaagacgtcagcgatggactcgctacaagagccaaagcagcgggaaaggacgacgtcgagccaggagtacggctacgcatgaccctacgaaggacccaccacgccaacccggggagtagatctatctccctatctcttgctttctctctccagtagaatacaagtcccactgtaaggttctacacttgagatacaaaaggatagggcccctccttcttcctacacaaacacaccagttgtaacacgctccacagcaatactatgattagcactacactagactagggcgcaagcctaaactaatataatcccccgtttcagatccatcgttgagtcctagcgattcaccattcagagtgagtccgcactagcatcccccaccgaacacaaatcttattgccccctggattccgaaaccacgacactatgctacacgaaacatacccaagaaagacacaatcactatcattggtccaagcttgcactttttattaatcggcacattgactttcgccatgcactcccaagtgtgcaagtatgaaagtgatggttttcttccaacccacttcccataagaggtttttatcttctttgcccataggaattctattcagaacatgacacgaagtcatactgcctcccccaccataccttagataaaccacatgtgtctaacatgacatttaccaagtcagacaacgtacaattttcctctcagcaatcccgtttgattcagatgaataggaaagtgtcctctcatgaataatgtcatgttctgcacaaaaagcatcataactttgattcggatgaataggaaagtattcaccgccgaggaggatcctctgtggtcggacatctctcgagtcgattacctaggtgaacatgtagcatcaaaattttaaacatgtaaattttagttaaaatactaacaaagactaggaaattatcaactcaccgtccatgcttctttccaccaccaccgacatgcgttgccaccggatcaattggtccatgccgccaatcgacgtcgtcgctatatggcgtcacatcatctcctacccttatttctcctacaattaagaaaacaaatttagaattggatgtttcaagactaactctaaattgtaaataactattcaatcattcagacatctgctgactgcaaaggaccttaatctatgtcgggtctgatcccctatgaccctagatgtattgtcaataggagatggatcaacaccaacttcaactttctgtatatagcaattagtaacagaaaagggaaaatatgttcttgaaacggtatttgacatatctcgctataagtcgacacatacgaatgtacctatcaccgccaaacgtatactcctaacccttattagcgaagctactcttcttcgtggacttctcttgaaattcttgagaataccataatcgacaaatggtccaaggacaatcttctagccacgagagttgtacatgcacatatgttgatgtatcaaaacaatagtaatacattaatatttaatttcttgataaaacaattgcactagtgataattgcaagggcacaataacctaaagtaagcagatcaatggaaatcctagatatgacatagaattattgtttgaactagcataatgtttcgtgaatttgtattatccccattgtagtgttacttataccataacaagagtggaatactatagaaccgtaccagacacccgagcaggcgaagtagtggccagggatggggatgatggtggcaccggggagccaaaaccgagacactaactaggaaatgcgggtgtcacatgcgcgagtgcagggggttgtgggcgcgtgcgtcgctcgtgtaggcggcgcgagagaggcggtgcaggcatggctcgactgtggactgagggcgacgatggagtgtggcggcgttcaggatcggtgcaagaaaacacgataaaagtgatggacgacgattgtaggaggaagaaagttgagccacctctaaaaacacttaattttcgacgggctctggttgccatcgaaaataaactcataatttttagcagtttataatcagtcgtaaaaaatagcaacattattttcgacagataagtgacaacattaccagaatccggctctttatcgagtgctcggttctttgtcgagtacattttgtcttgcattcggcacagtcggctctgccgagtgccgcactcggcaaaatagtactctcggcaaagacaacgtttatcgagcgtgcgacactcggcaaagactaacactcggcaaatcagcctttaccgagtgtcggcgaaatgcaactctcggcaaaggaccgtcagcagcagtctatagctgacggccgttaactttgccaagaaccaattgttgacactcgataaatgttgcttctttgctgagtgcgcaacttttagcactcggcaca

SEQ ID NO: 149 - DNA, 3900 bp, Zea mays
ccgcatgggtacgagtataagtaaaattttatacccgggagtatatatgcgtaatccgacagataaattgtttttatctgtataggtatagaatggtactgtccgacagtccgttggcatccctaacacggcatgatgagcaacagggcggctgtcggctggccaacaacacttgtgggtccgcgtcatgtgggactcgagtgggcgctggtgggtaccgttgggccggcaccgtgtgcttttggtggtaggaacgcacactgccctattgggctggagtgggccgcatccaaattgattcgatcttcttgttggaaggaaaggccgcaaagttcttagggtgtgtttggtttgacttttggctttggcttttgccccctaaaagccaaaagccaaccaaagggctggatccaggaagcagctttttctaaaagccgactttctcgtagtgcaaatctgaaagcacccttggacctgcttttagtgacttttcggatggaactgtgaaaacatatatcgaagaatttttaacgacttttagtgatttctaccaaacggtttttagctttttaacaacttacagcatacagcagctttttctacagctcacagcccacagcaacttttttcacagccacagcccaaccaaacagacccttaaaatcaccttgtttttggaggatgtatttttatatataaaaaagaagttaaataaaggtaatttttaaaaaataaaatcgcagtggaggcatctatggctggtctaagagtagctccatagttatgtaaatttcagttctctaaattacatatttaaggagttgttaaataactttgagaataaaaaattatgggttcttcaatagctctttagatataggttgtagctttattttgaatctatccatgtcaaaaaaagtcacgatgttcttttagggtagttgataaatggttatcaaatgtagagataaaatcagtttagataagttgtagctaaatttaggaattttatttagaaagctatcgagagcagtttttagattaactatctaaattattaatttaaagagtctttagagctactggagttgctctgaccgtccacaggagtactagttggtagtctcaagtctctcagctctcaaggcattttctttgactgtggttttcttttgttcttgcttgcttgtcaggtagcacggctgctgagacattactgtcagggtctcacggctcaaggagttacaagttcaacgccggtgctgttttcttagcagtgctcgtagccatagtagattcctaccacatctacacctggcttatttcttggcatggagaattccaagagagccgcctagataggcgtaaggtgtagtggtgtactctgtctcacgtgcgctttgcatttttagagttcaaattttgtcataaaaactacatggtaaacaagacaagcaaagcaagcaacctgtagatagccttggcaagtgcaggcattggaacagggtataccatctcgccttccatctaaatcccgatgatgagctaagtcgaaaaaccgctcaaatatcaccggaattcgtaaatcttgaacggtttttacttcaaatttaaaaaaatgaaatttgctattctcgggcggtattcgatgaatcccaagcgctttttggtgatttaccaccgataaatgctgattagttttgaaaaaaaaatatgacatactttataggatttttttcccatttttatagattttttgaaactcaaaattttaaacgaattttctgataatatcgtcggggtctattttcgtttagtaccgcacgctaatgagaaattttaatagtaaccaactgttaccgtgcgggatttgaaaccatgcattggagcagccgtgggaagtgcagcgcaggaagaaggaacaactccgatgatgagggatatttgttttttttttagttagagaatgtgtatcatggctttgttccactctagagtagatttactccaaaattcttaatgaaacagttctgctcaaaagtctagatttatttcttataatcagtgacaacatagataaatatatttatactttatatctacattgtctttaaagaatttcagagcactaaaagaactaaaagaggtactctaaaaattatactacatgttgtagtagggttcttgtttgactgtctattgtcagcttgtcttcaagttttgctctagaaatcattccaaacatccccttagttaattaattagttataaaaaacttaaaaaaatcaatgcctcatttatttgagaaatctgcaactctaaatatctttttaataaaaaattctcaactacagattcgtagacctatgtatagcatttttaccatttttaacttctctccccatctactcgtagataaccttattttaatagccataatgtctaagaacctattaccataatcagaagtgtcatgtaggaaagacaacattagttactatccatgagaaaataccactacaaagagtacctactattacaacaaactagtacaatatcagtgcattaagacgacacaattgttatattctgcacaataaacaatgcaaattgtatatacttttttgactaaaacattgagtagatggccaccttaggatcaactacttaatttgtaccaaaccaaccaattcaaaagttagctaccctaagattatctccaacagatcgtgtatataattgtgcaaaacactatttttcactaaagaatatagaccagactgttcacagagtgaaatttgaaatatgagatagaatgagagatatgatgggtaaggtttggagacaacctaagaatgatactaattatgattgatgccaaaatttgtcaagcaattgctaccatggcggtatacgtatatcaggcctgtttggttcactgcctaacttgccacactttgtaacttttctgcctaagtttagttcttcaattcgaacacctaaccttagtcaaagtgtgacgtagttagccacgaaccaaacaggtccatcatccatttgttgtcgtgatttggtatcaaagtctactgtgtgactctttcgcaagagggactatggtgaaaactagaaaaaccggtgattgcgggttagattagaaagaaatataataacttttttttttaaaaaaaaggaacgacggtggatatcagaaaagctgatgttttataggagcaaagatttctgcgtggaataatcgaccctttccattctagaaagaacatgattacagaataaatttatttatgtataaaaaaactatttactatagcaaataagcacagtactagattcattgcaaaatatatccctatagtatttctatttggagccattcatgttgttgacagtgttttagtatttctatttatagccattcattataaaaatatttatatttagaatcgtttgactttggctacagctagaatttaatctcttcggaaatgaaaggaggtggtggtagatgattaatcgaaaaaacacccaactgaattgcatctctttgggttggaaacggctgcccccgcaatccccgcagacccggcgtatggatccaaacccaactcaaccgcacgcatttctctttcgtcgcactcgcacgcacgcacgcacggcgtcccaagccaagcaaccgcccgcggccccgtgccgagtacacccgatccgatcctcctactcgcttgctgttgctaggtcatggccacgaccacgcacggcgcgcgtacgtgacgtgcatgcgctctcgccctcgaccggtcactattactgtcgccgccgtgccaccactggggtggggaggagcggagttgtggggttgcaagtgttgccgcgctgctcgtg

SEQ ID NO: 150 - DNA, 3000 bp, Zea mays
tataaggaaattatctacaactttcttatagttgataatgactgattctaaactgaacttaagcaaacaatgcgatctctgaaatctgtacaggaattggacagattcagttactgaatttaagaaaagcataacttctaaactatcaggtttatgactatcagattttaacacaagtaaggtaataaagttatctacaaatttcttgtcaccacaaataactgatttcgacaataacttaagcaaccattgcaatctctaaaatctgttcagaaattggacaggtttagttactgaacttgtgaaaagcatagcttctaaacgatcagacttatgactgtcaaatttttacacgagcaagataataaagttatgtacaacttttctatatgacgtttctacagaaaacatattttacttgactagattacactcacaaccaaaaaagtacacgcaggaattttagtttgctagcacaagagcactcaactcaataatcaattaaaatcatggaaagacactaccatcaatttctcaagtttaaaccattatgacttagttataaagtttcaatttatattgagatacttaagcattttaaaaaacatgcacacttttgttttcttctaatttttcactaactcttcttataattatgaaatgggtgttattttagcaccatatgaaactatctaatttggggttgaaatttttacgaggcataggtaatgacaaatcatgactaatgtataaattttacatgctcagattttatattttatttaatacaaaaataacaaattattaacgcaataaagcatgtgagagcaagttaaatctaaaactaattattttgtgtggatgcatgaccatattaattttttaggctaatataatatcatgcaaggacagtggaacaccatttttcatttttacattcatatattatttataaaccatttaaaactacctaatatgcatcaaacaaggtaaatcactaacttaatcatacatgcaccaaaattcatgaaatttttaccggtcaccaagaatcacaccaagagcctactgtaaaaatttgaatccatttggatcaaaagagctatagatctaaaaataacaagcaaaacaattatcttttatatttttctcagctatagtatgacaacatctaactaacaaaacaagtttcattatttttggatttttataattaaaaatttggagagaagaaagttcatttattttgtaaactagttttaaatacgaatttctgcagaaaacctttccactaaaacatgccaacttatagatctaatagatagataatttcataaggaagggaacaaaataagtttcacaattttaggagctaccaaactcaagatatgaattatagaagatattacgaaatctggaatttgaagcaccattacccttcgccttgggcccacacgtcagcctcacaaacaccttcttcaaccttcagccaaccaacagacaatgaacagccacgaaacgcagggaaaaaaagaaagggagggaagatccctgtgcagtcggagggggagggagaggaggaggccaagggtatccatttataggcgagggagcagcaaggggcggacacaaggcagccattgcagacgcaagctctgtgtattggtgggcatgggtggctgcgaggcattgcacctttccttatggacgaagcaacgaacacacagtgggcggacgttttcgtcgttttccccttagaatcggatcaaggttactgcacaaaatatcttccttgatgtacactctacaaatcttgtaaaaggcttgaggtgattcgggcactggttagagagttatagacccacgaaaattggtttgtcagtggctcagaaatcagtggaaacttgtgaaaactgaatgtcaaagcatatcaaacggaatcggatggatgccatcttttaatatgttgtgcccctattaattattaacaacttttatatttgggaaaacttgagttgttcaacaaaaatgtgggaacacgagaagtcgacccgaacgatgttgatttcagacttagaagaattcgaattctgaaatcagatttttattctgtcttgatggcactgtttgagatacttagagattgaatcaaggcttagtttaaatataaaatttgttgtataacacaggttctacaatgtttattaaaggtcaaacctcatatcttgaatataaattaaagtttcactttggtcaaggtagcatcattataaatcttcaaattatatttttaagacaatcggggtatttctcgacattttcatggcattttctctgcatgaacccttaataacttttgttgtagagttgatatagagttgtttgagcaagatgacaaggttttgttgaatttcaaaattcgcatttgttcggacgagcatttttcagcatgtataggatttatcttttcatgtgtgtatttggttcgaacttttagaaatctttagatacacttgatagatagagatgaatgatgatatagagaaaacaagccgttttgcataagaattaattagaggttgacacaatagagattccgctggagaatgcggattcggacatagttcgactagcaaccgtagagcgtttgattaaatgagcttcagatgagaattataagtcgagaatgattttcgagtttgcgttcgtgccgataattaaaagttttaacaggctccaaaattggttgtttctcgcgatcgaataactccgaattcggtgaaatgtgaatgaatagtctggataatcagagacatacgcgagcgagaaatagaaatgttcactgagcatccgagattaggataaatatctcgacgtaacacgaactagacacctagggtgtcacacaaccctacctgaaagatgggcaagagggggcggcaatggtttggtggcagttcatgttaacatggggtggtagtcttggctaagttacctcac

SEQ ID NO: 151 - DNA, 3200 bp, Zea mays
ttgcatgagttcaagtcggactcgtcgagtctgattaagaagtgattttgttttggatgacttggtttcaaatggcgccagcagaatctcgactacttgctccgttgaattattattcccaagtttttggagttgaatgagcagccgaagctggattggacatgcataaggccttgttcgtttctgccggattggtgggtcggaacgattcctgaccggattggttctctaatttatataaactttgattagctggaacgattccgggtgcaatccgacggaaacgaacaaggcctaaggcttgtttgctactcaatcggtaccgaattacaagttgttatgtaaataaatgcgctatttgtcaccctcatgcctcatgtgatggatccaatggtccattatttatattggtgtaatccaatcaactagacatcaaaacgaaacattttttttcccggatctgtatcatctaatgggtcggaccagtgaagcgctttttaaactgattgatgtttatactcaggcacttataagtaatttcatctaatattcatctattttaaggcattccatattacttaactcattgcatattgcttaagtcattttatctgttatcaactattttatcttattcaatcctttaattagttttttttaactaattttaagtcatttcatgtattttcagacacttaaccttactcggtgcttgttaatatcctttagttttcagctatttttgaagtcattccatgtgttttcaaatattttatattacttcatgtttgttaattgattgatgtttatacttagtcacttttaagtaattccatatgatattcagctattttaagccatttcatattattttaggtaattccttattatttaagttattttatctaattttcagctatttcatcatatttagccctttaattagttttccaactagcttgtaataatatcgtaaaagttatacatcggggataaccttttcataacggtgttgaacaccaaaagtgatggacggtctggctcaagggcccggacggtacgcgcccccacgatcagattaactcggatgattatccttatctgatgtgtggttatctatctaatcacgtggggtttgttagctatcgcctaggaacgggtccagacctccctatatatatgaacgggtacgaccgattgaaaccctcgaatacattgcaatcgaatcaattactttctttattatgtctgccttagaagtagatgtagcatagtctagttataactttccgcatatccacctcaacccctattcaactatacatcgtctagatccatcttggatgacctgctgacctcaaggcgactctaggatcttacccctcccggggggcaagatttattcatcgaattgatctcttaatttctataggactcgccgactctacgacgtctgaggatgccccaggtctagattccagcgaggaggaagacgaccctgcgccatcgtgaaacgttcgaccttgtgtgtggaccgtccggtgcgacacaagaaaggggtcgcttctgcgcccaggtcgtggaccatccggcgcgctgccgtagaggcactgtcagatggtacacctctagcgattggcgatgtgcagatcaactctaacaaaaagattttattttttaattaactctctgcaattctatagtaaatagattgtacatgtcattagagcaaccaataatatatatttgtggaattttgtagcttgcctggcactagtccatttatttatgtagttgttactttgcctctactctagcattacttcctatggttccttgcagtcgtcctgctgttatttccccaatgtatctggaaggaggttgccgacgtgattgaaggcattttttggatgtccttgcccttgcatgcagccgacgtgagaattgaatcgaagttatggtaatgttgcatgaatcaactccttttagcaccgcatgttgtcttaaataacaatgtcacatcatcctaaaactagataacaatatgtacagagttttaacccagttaaactctactatctcttatgaagctctctctatatctattctcataattgcactcccatattaccaagcatgataatatgccaccacatttaatgagtataaaactcttattgagaatatccttatatgagtgttagtaaccggtttaagacaggaaagacaacttattgagaagaactatgaaacatattaaataagggtacgatgagaaattagcatccaccttggtatattaaatactgtccaaaataactactaaaaggaattggagggagtatttgctcttaaaacaatgctcgtggtgcccttggctactcacaccggtttaacaaaactaaaatatatacaatacatttgagagtatgacaaataagcatgtacaaaaatttaaaatttaaaatatatttaatatatgtatttgtgtatagaggacgtgatttagaggacgttgtttgagaggaagaagatatatgagataaaatcttttagaggagacggtaaaagacacatatagaggatggatatagaggacgttgctggagacaactatcttcagcaacgtcctctaaatttcatctcctaaaagaatattctttgttctttacagaccactctaaaagattccgtcctttatagctttactctctccaatagcatcatctatattaaataatcaattaaaatcgatatgtcaacgtctctatattaaataatcaattaaaatcgctatgtcaacgtctcctcaacatgggccccttatttgtccagagcctacgaagagctatagaggagcctccaaatgtagaggtcgtggcaagactccgctattttacaggtccatttagcattctctgttggagccaaaaaaggtgcaagtgaaacgctatatttagggtacatgaccatttacgagttgtgaccatttacgagttgttgcttgacttctatcctaaacctagggtgttctctctcatctctattttttatactttaaactatgaattaattagagtggcagagctagagggtggttcgtttggaccaccatagccaaaaacccattaaactatatgtattaggtataaaaatattactcttaagcagtagctatgttttatttatttgatgcgtcc

SEQ ID NO: 152 - DNA, 3200 bp, Zea mays
tgttgcgttggaaggaaccttcgtgcagtcaactgaaccgaaccgcatctgtctactctgagtgtgtttggatgaagatactagagaggttaaaatcgaattaggaggatgaaagtggatatctgaatggttaaaacaaactagtcggttgcccgtgcgttgcgacggcttacaacaatacccacgtaaactatccattaaaaaatttcaagattttttattgattgtctccgctctctgtataatatatttttttgatttggctaactgatgttattgtttactcaatgcaaatatgttttggtacaacacggccaatgaagtgagcgattataagagagttcacaatgattgactgaatgaacagagattataaaatgacataattccatcatacagagaccaaataagagaaagtttgtgagatcaagtttctaaaataagtcccatgaagtcaaacttataaaaaaagatatatcaaaatatggagtgatgctaaagtcaggcataaataaaaactggatgcgctccatataaattatgctacttcgtagcaattactaacgtttaaaaccaataaataacctttattttgctgttagtgtgacaaatcattgctgttccattcaattcagcaacctcaaacaccatgtattccattgtgccaatgtggtctcagaaacgacctaatgcttgcaagagccaagaacatcgtgtcgtgcttgggctgtagcctcggcctgacacgattattttttttattttacaaaaaaacgtatatacatacatacaatttatatttaatattaaaaacatcttagcgtgatgttctactggttagacagcttcacccaatgtctcctgcccttcttccatcaacgcatgggttcgaaccccatctcctgcaccgtttttttaatattttacgctgatttaattaaatggatcgacgggctaacggactggcccgatacagttagcaggccggcatgacgtgcctgtgccatagttgtggcccgcgtgcatctatcccgtgtcgggtgtcattacgctgatttaattaaatgaatcgacgggctaacgggctggcccgacacagttagcaggccatatagacgtgcagcggattaatttgaaatagatgtgaggggttatttgtaaaaaatgacacacgacgaccgttgaaactggtgctttaagtatagtatagatttaatattttaaaatgtgtatgtattaaatttggtaatgaatttttcttatgttataagtacattattacaaactatgaacagaattttgcataaattattttgtgtcatttgctccctacaaccaaaaacgtaaaaaaaatattgatatctatatttgattctgtatatatctattatttgagaagatatatgataaaattgaggtttttatttatctttacatgcgcagtgctaaaaaaagaatacaaatttgtattacagattttatattctaatgttcgcaatcaaaaaattggtatccgaataagtatccattttcatcctcaattagatccaatagcaaatctatctagtattgaaaatgagttgcaatataaatctattgtttggatgtaacagagggagggtcggtccaccttctactcatgacctacaacccttaggtctgtggcccactcatgacctatcgagcctaggcctgagtgcactggtcgcctataggacccgcaacacgacaagctgtgtcgagacccaggctatgtaggccaagggtcgtcatggcataaaagtggcaatgatggtgtcagagctccttgccgcccacaccgcccgtcataaagagcgtaaccaggatagcccagacgaccgagacacatacggaaaacacaactttaccaaggtagaacgtctcattttaccacggcacattagctccttccttgagaagctactggtagtcgaccctcaccttagcctataaaaagggaggaggtcagccagaacacagatacgaacacatgcatacaaacacgtcgaccacaagacgagaagatcccgaaggagtcaaggagcgaaccaccatgacgcccaaggctgagtagagagcactagtcctgtagtctttaggtctagccacacataagagacttgggagctcctctctctctcacacacccgcttgtaacccctactacgagcattgagcaacaaggtgtcgatagcgcgagccaacaaagactggatgtagagacgttcagcccaaaccagtataaatcttacgcccactgagcacaccatctggactgcagcatgccgatgtctgccacaaagaactgcatgtaattgatgtagaagtggtcttaagtgccacatgtgatgagcaaggtgatgtgccccaaaggaaatgtgaacatccctaagataatgccatagaagggcactaaacttggcttaagagtcaacttgggaagtcccatccttttgaaagtcttggcgaagaggatgttcaacaactactgccatcaataaggccttaacacaacctcacaacacctatcgttggaccaaagatgagtagcaccttaggcatggtcatggtctaggtgatcagactagtcaaaagtgatcgacacttcagatcattagaggaattctagggtcgtcggttccacgatgaacacctctctctctatgtaagcttctgcttccccttagactcataagcgtttggctcaggcctctttggcttgggttcaagcggcttgaggaccttctcggtggatccctgaagtgaaagcaatccttggtctttatggtggatatttggatgataaatgcaatgtccctccataatcttctaaaactcatcttggttatgggagaaagatcatcgctgaccctcctgcttgactaccgtcgtgaattgatgatccatcttactccttttaggtccaaattatgaggcattttggacaaagtttgagacaaacttgtaaaactttgactataaataactattttgttatttagttttgaaacctaaaaaatactttcacaaaagtataaatatattaagagttcatttgtaatttacaaaaaatattggtaaaatctatattttggagaccgtatcgttgtcttaaacgacttataacttggacctcaagagagtatgtttcttgtgtctgcctttatctggctcagttt

SEQ ID NO: 153 - DNA, 3000 bp, Zea mays
gatgcaaggtgaataggtgattgtaccattgtgacaggggcagctaagaagaccaaatgaaccattaaagagtccaagtttcaatttattgggtagtataggaaacaacatgtctgaaacaacaactttcagtttgtgccagactcagaggagagaatgtctgaatgccatacttttctatgcgtggatacctgcacacaaatattctcactttttacatctagtagtgcacataaattctcatacttcaaaaacaatgagattatctagcaatgtcatgcaactacctaaatctaataaaatgacattcagaaagggattttgcaacctcaccttcaaggaaacttacacctttatacatacgcttatagttctgcgttgattttggcagaatatcaagtgaaaaaacagcagcggcaaagatcagattatggttcatgtcttccactaacaagcatttattatagacaaactgagaagctggtaataatgtgattatggaagttgttttcaaacaatagtatagtttgttaaatcggagtaaaatgctaactcaacagcttgatgcaaagacatgaaccattataagtatataacagtaatgacctgcaatttctggatgaatatcttatttcagcttacctatgagatcaatgggaagtccttggacacctctctgcgacattgcccttacaacaaccttcttgcaatttgaagtaaccagtggtcctgctgatgtggctttagaagagatgacacaattagttctggaacagattgcccttccaaatgtagataatgctaatgtcgacccaagcatttgcttgcaggctgggatgcaagggcgcgttgccatcatctacatatcggtcgtcgcatatgctctcatcctcctttatgtacaaaaaggagtaggactgcaaaaaatgttttggaaacaatatcatggactacacttaaggacatataatgatgtgtattgttttaaggtcaggatgtgtatttattgattgagaaggtttcactgctacagtcaagttcaggtaaacaccatgaatccaaaactaacccagggttattcacaatctcaatgagacaatgacaacttcaacctggggaatacatattacaacaagccaaacctatgtgctattttaattactacatttgtttccttaaatgaaaggtcaacattttcaatagctttggataatgcaataaaaacaatgcccctcgcgaagttactgtcacctaggagaaatagtacagttattagaaggacctaaaaacatggcttgtaaagttaattctaatatacatattcgtataatatagcctaacctttattaccaatatttatccaactataaaggtaatttccaaaatatggatagaacaaataaaagcctcgaaacttctgctaatgtcgtccttagatgggtcactgggtcagtacttttagcagtatgttttgtatggtgcagtgagatgagaaagctccaactaaagtcgcttgactcaatatccatcatggaagccattccaagcctctcccaaaggattcctcctcgcacttggtcacaagggtcaaggtcaatgaacatgtgttgcaggttcttgaatgttctaagtacaaataaacatgtgttgcaggttatgttggcaataattaggtggtgactatcttgtttacctggaattctaagtgaagcatgattctaccttaacaactaagatctcaatctatcttaatctgtccaacccaaccctaaataaaaaaaggaatcacatttcagaaaggattgacgagttacaaagcacaatgcatgttcataacctttggttatttccaaaacaaagtcttgcatatatggctagaacagtaatatggaacaacaaaaaagtaagggtgtgaacagagcatggtgccaaagaaatgaggcaatgttgtaatatcaaacaaaacaaaaaatatatttaaatgaacaaatatgatacatgaaaatttagttaagaataatcatatagttatatgtagaattattacggttactcaggatgacttcgaaagtatggggatttccaacatgttcgattgtgttgttggtcgctggcccataataactccatcgaaagcttactaaagaattcttatgcatacacatgaaactcaagaaccgtgttatgaccaaaaggttcaggcctgacaactgaagattcaaaagcaagggcacaaaaattgtgaaaagacaacatgatccttccacatcctaagataagcaaaaaaacatctctacttgggtaattgatttttcagtcggctaaaagtaatagttcgattttgccaacaagatcagctatatgcttgtagagtggaacctgcacagcaacaagtgtccaatgatccgagaataagaattatatgcggtggcatgacatatttatcaaatcatgatgattttagaagaaaagcaacaactcttttttagaagcaccagctttgcaagctatagttgacacagccagcatagcatttccaccaaggtcagcctgcatttcgcacaatatcatatctatttcatttggataaaatatatttgcccgaaataaaggaacaaaaccaagatagaaaaagtttaggcagtaccgataagtggaaacacaaattcagtgaaaagaacataattatttccacatagtcaaataaaactgaaataatcagtatcccattgcccctatattgactatacccattgtaaataatttcttgagcatattgagtcatcaattgtttgtgtacaacatgggtttgacaggaacaaaaagctacaggggagagaaaaaggaaaaggatctccgagtgttccaccttgtggcatgtcttttccaagtccatgatggcctggtcaatctatgcatgttgctgtgaatccatcccagggagcacctttgacaccttgtcattgctcacctgcaccgcgtcaatgaataccctgcaag

SEQ ID NO: 154 - DNA, 6000 bp, Zea mays
cgcgggacgaacacgaaggccgcgggattcccacctctctcacgccggtctccggccgcctcgctccttccccccttcgcgctcgccctcgcgctcgacccatctgggctggggcacgcggcgacactcactcgtcggcccgagggacccccccggtctcgaagcgccgacaatacatgtcttaagtttttttaaattcactcctttagacacactttaagatacagcttaagatatccattgtacatgccctaaggggtgtttggtttctagtgactaatatttagtccctacattttattccatttaagttgcaaaattaccaaatatagaaactaaaactctattttagtttatatatttggcaatttatacactaaaatgaagtaaaatgataggactaaatattagtctctagaaaccaaacactaaagtgtaacaaaaaaaaacatgagttcagagctacaaggcacaagtacacgtgttagtcttaaaaaaaatatggaatctcggatcctttccggctaccctgacactaccaagattcatgaaaagtttttgccgaaattttgaaccctactactgtcacgtcagttaggacatgcataaaaccaacagccatatctagctaaccgttttgacaagtaccgaaacgtgcttgcgtgcgcgcttctttactagacagagaggctaccagcctaccacagccactttcatttcgagaccccgtaccgccatcactcgacgcgatgtgttttaaatttgcgtaaaatcttgttttatccacacaaaaaaaaaatcataccatggcgcacatgtgtgggtccgcgtctgaatttaatgtgctgccacgtacgataagacaggggttgttcttcgccaagtgcatctgaggaaggaactaatcaatatatatatagtctcgaaagccctcttgatgacagtataaattgagtgattagccaagactaggcaaacggttcacgtaaaggcctgatggagctttattacactgtgcctatatgtgtgtgtgtatgtttttttttttttttgccataagctgcacgttaggtatttgggaaattggtaaggttgctcaattatggcgtacaagctttagccctaattacgttattgtccacacgctgacgcacacgtatatgcatatatatggcactcgacgactatagtttttttttaatctttccttccagccttcaccacatgtcttgaacagaacaataccacgattcaattgcttcgtgttcctctaaccaaggcagtcccttcgaacagattgcaagcctctccacaagacctcttaccaaggaccaaatggaggcaatcatgtggccggtgaatcaaggaaaagagaagacaatgtcaaagaagagggggtgcgaggtgcctcctctggttcccccagccacacctaggctgcggtgggaaattgagcatgctgccctgttggttgtccgatgtttaggacttttccattgttcctatcacacgtggattaaatgagattggaaaaaattataagagattttgacttgttcgagatttaaaaccactcaatcccacttaatccacatggtttgagagaacaaaacaaacaagcccttaatgttacaccagctggattgttcttgttcctgtcacagtggggttatctagttatgtcattgaccgtagtgctcggtgttctagtgtctagtcggtggcttttgtatccctgccatcgagtgcctagctttgtgtttgcctgctttcagcttgttagtctggggtttgccaagtgacagtaagacacaatcctttcgtggtgggagactttgggtgccttgttacatcagatattcgtttcgatgttttccttgtgcctttctgttttcccaagtagacgtggtagttaaatgtgtttcaattgcactgtttttttcatggaacgtgaggggtttaaatgaccgtgctagtgaaggatgagatgagcaatcctctctacaagacaagagcgtccctgggtctatgcgggctgtgctaccacacaagtaccccaaaattgcagggccctaattttagtagaggttcatatatattaaatgaaaaaagtattatattccatgtattctaggccaaattatttgcggtaactaaaaagattgtgtcacgctgcatcacgactctagaatctaagtggtgtccattgctcttccaaatcctacgcgtcttacttagacctggaccaatgtcggtcagtaatatataaatatacaagcatcggttagtagtatctacgagaacatcattggagataatgctttttaaatagagaatatgtaactggtacaatttaatacatataatttgtattataacatcattgtaacatcattggagataatgctttttaaatacagaatatgtaactagtacaatttaatacatacaattgtaacatcactggagatgatcctacaatgactaggattgacagatttcttgcgacaactaagtggcatgatctcttcccctcggcggacctacaatccgtttgcaccatgacctcggaccactgcccgcttattaagcaaggtcgttcttccttttgcttcttccgtttgcaccatgatttctcgtatgcacgtaaatgcattttaatagattcatctacatatcgctttaactgatctcctcgttgatccatgaaagtcgtaagagatagatctggagtacttacagcgggaccctgcagtggaggtaggagagattccatatcgatctccccttgacggacgatcttctggtggcgatccaccgtgaagtgtgacaagtacttgtccgccgcctccttgcgccgttcggagagtttatgcagcagttccgcctcttccttgtcgcgttgttcgttccattgccgcatcacctccttctcatcgtgcattacgaggtcttcaaagggcctttggtcatcagccgggagcgcctccatggccggcttgatgatgttggtagtggagatcttggtgtgatccttagaaccggccatttatgggccgatttttagcagatctagacacctattccccagcggagtcgccaaaaagtatgttgacaccttttcggaggcgccaatcactcaaaagaaccagtggcggtactctctggtcaggcgcggacggtccgcgacctggcgcagggctcgggtcctctgcctgacgaccggacggtccgcgccctggggccggacggtccgcgcgtgcgcaggggcggcagaagatcgccggcggcgcctggatctcgctcccgggaggaacccccgtcggggaggagagatcctaggggttgtctaggctcgggccggccgacctagactcctctaatcggcgtagagtcgaagagaggcgaagaatttggggattggaatactaaactagggctaaactagaactagactagagctactcctaattgtgctgaaaataaatgcgagatagaagttgtattggttcgattgttgggggttcaatcggccgtagcccttcatctatataaagagggaggtctggatccgtttccaactgtttcccgagttaatcccgcggttttaggtaacaaatcccgcgagaaactaggaaccctaactgactctgcgcgcgcgcggaccgtctgcgccaccaccgcggacagtccggaccgcggaccgtccggcctcggggccggaccgtccgcactgctctttttagagctcaacaccacgattcaattgcttcgtgttcctctaaccaagtcagtcccttcgaacagattgcaagcctctccacaagacctcttaccaaggaccaaatggaggcaatcatgtggctggtgaatcaaggaaaagagaagacaatgtcaaagaagagggggtgcgaggtgcctcctctggttcccccagtcacctagctgcggtgggaaactgagcgtgctgccctggtggttgtccgatgcttaatgttacaccagatggattgttcttgttcctgtcacagtggggttatctagttatgtcattgaccgtagtgctcggtgttctagtgtctagtcggtggcttttgtatccctgccatcgagtgcctttgtgtttgcctgctttcagcttgttagtctggggtttgccgagtgacagcaagacacaatcctttcgtggtgggagactttgggtgccttgttacatcagatattcgttccgatgttttccttgtgcctttctgttttcccaagtagacgtggtagttaaatgtgttccaattgcactgttttttcatggaacgtgaggggtttaaatgatcgtgctagtgaagggtgagatgaacaatcctctctacaggacaagagcgtccctgggtctgtgcgggctgtgcgaccacacaagtaccccaaaattgcatggccctaattttagtagaggttcatatatattaaatggaaaaagtattatattccatgtattttaggccaaattatttgaggtaactaaaaagattgtgtcacactgcatcatgactctagaatctaagtggtgttcattgctctttcaaatcctacgtgtcttacttagacctggaccaatgttggtcagtagtatataaatatacaagcatcggttagtagtatctatgagaacatcattggagataatgcttttaaatagagaatatgtaactagtacaatttaatacatataatttgtattataacatcattggagataatgctttttaaatacagaatatgtaactagtacaatttaataaatacaattgtaacatcactggagatgatcctacaatgactaggattgacagatttcttgcgacaactaagtggcatgatctcttcccctcggcggacctacaatccgtttgcaccatgacctcggaccactgcccgctttttaagcaaggtcgttcttccttttgcttctgcaagggttttagattcgaatcgttctggaaaaaaattaatggtttcaaagaggtggtgtatcaagcttggaatactagagttaactatgcgggcgccatcctaggtcttcatgtgaagatggtctgcactgctaaatctctatgtgcttggagacgaaaaacagttggtaacgccaaggtgcaattggcaatcattcattcatattactagaacattaggcgccccttcgggcgccccactgtgtagccgagtacttctggcatccaactttctccattaccttcatttccaatgatcctcctgcaaacacctccataagcgaggccatctgacaatggtggtcaattccaaatgatccgcgcatggagcacgagacacggctcccaactttcagaatcgtttacacgagaagcaaagcacagccacaacttagagagtctgcgaaaaaacggagaaccaccatgccaaacagcgcgtccagtttgaaatcagaggggtcgcagtcaggggacggaccgggcccgaaacgacaaggctaggccattgttgatttgcctgtcacacaaaaaggaaatgcaatcagtgaacagaaaaagtgtacaagtctgaaacagcagagaggccttttttcagacatgaggaatgggatcctttgctttatgtacaatccattccctacagcaggaagtgtacaagtctgcgtttccagtaatctacaggtcatgcctacagccgcaatgggaaaaacaagctatcaagtcatccctgcaccgaagataaaaatagttatagcagcatctttcaatgaagcacttataaggaatttacttacattagatcatagcaagtttcagttcaagtgatttgtttacacgaagctaatatacaatatgcttacttaacctcattttggctctattaacaattaattagggacggaaagcgaataaaactgaagccatcacagcaactgatatgaaaacaaatattatgcattaaaaataatcaccaccatggcaaaaggagtaaact

SEQ ID NO: 155 - DNA, 5000 bp, Zea mays
gggatgccgctcctcggcgccgcctgctgctgctgctcctccttcgcctccgtgctccgccgcagccgccaagacaacgagagagaggaataaggttgggagagtatatatagttgtttggggtagggttttagtttgcgggattcaccaatttgccctttgacgggccgtttgggcctcggccctgtagtgcggtggcaacaggcctacgttctaaaatttggcccgcccttcaccggccatcgacgagttcttttttttaaataacccttctctctccttcctttgagaatacggataggatcataggagcactgtatttatttgtctctgtgaaaaataaccatcaatctataatggactgcagtctaacatagaaagttagatgtgtgatagacaatgtcacacaagtttgatgtatcatagcaaaaatattaccttacatcttatttactaatgtcacacaagtttgatgtatcgcataaaatttttcttacatttgatgaagtgatgaacacatatcaagtgtaatgttatattttgtgtaattgtatggtcaaacaatacatttatttgattgcataggatatctattgttagttgcaggtatattcgatggctcgcacacttagttgattgtgtttctggtgattttttactgattattatttcgatgatattatcatgctagtttagagccatgatatggagtaggcataggcaccgttctcgaaaaacatgatttgttcatgtaacctttggcagagctccactccatgattctctagctccgatagtcgattctctaacagagtgataccgagtgattctctaacacaaatgaatttatttgacaaaatcgtttgacaaataggctctgaagtgattcctgataagttagagagtggggaggagggtttctttatctcactctttataaaacactagttgattgaccgtgcgttgtgacggctcacaacaatactcacgtaaaatatccaccaaaaatatatcaagatttttattgattgtctccgcataatattttttttatttgactaactgatgttgttgtttactccatccaatataacaacacgaccaatgaaaggagcgattagaagagagttcacaacgattgactaaacggatagatattatagaatggcataattccaccatacagagacaaaataagagggtttgtgatctcaagattctaaaataagtcacatgaactcaaacttataaaaaagatagatcaaaatatagagtggttgctaaagttatgcatcaataaaaactgaatgcgctccatacaagttatggtacttcgtaccaattattaacctttccatttacttttagcgtgacaaatcattgctgcttcatccaattcagcaacctcaaacatcatggagtccattgcaccaatgtggtctcagaaacggcttaatgcatgcaagagccaagaacacaagggacgaacaccctatggtaatgctcgtatggatcaccgaatcctaacacatattttacaggatccatgaaccatcatcagaagaacacaaaccatgtgcagaaaataaataaagtattatcacacccaaattatgttaagtccttagcacaacaaaaaaactaacacttaaaacaacagaggaacaacataataatttctgcaatgataaaaggatgtgtgacagatacatagaagcggtacaagcataccgagtcgacaccatggtaagggaaaaagccatgtagacacgcgatgtcgagccatcgaacgagtaccatagacagcaaatcagggaccccccatctctcgcctccatcacttccaaggttttgtagagcaggaagagaacggaagagttgggcatacctgttcgttgtcgaagaaggacacgacgaaggtctgggcatctagagacgacatagctagtatgtcgctagatacatatagggagagagcacgtaaacacagaaagtagcatagccaaagcagctccagaccgagaggcacccacatcagacgtcagtccgagaaggaaaccctaacatataaagttagatatgtgatagctaatggcacacaagtttgatgtatcacattaaaattttcttacattttatgaagacatatcgtgtgtaatgatatatttttgtgtaatcgtgtggtcaaacaatacatgtgattgcatataatatctattgttagttgcaggtatattcgatggctcgcacacttacttgattgtgtttctggtgattttttactgattattctttcgatgatattatcatgctagtttagagccatgatatggagtaggcataggcactattctcgaaaaacatgatctgttcatgtaaccttggttccgcttgtttaaagctaaataaatgacataggcaagcatcctcagggcatgtacaatgtagataccacgacacggttctcaaagtagaagatataattaagacatagttaagtacaaaggagtgtgtctaaagccttgtatcttaattaatactgcatactctttgaattaaatgatggttgatccattgtgtatatgtactatatatacacatatatgttgcatacttgacaaattttgcaatataaaatatacatatatggttgatttaacgtggaccgtactgttgccatatatgttcaactaaatcatttttgagctcgatgtgctttgagcgatccctaatctctgcatttggtccaagtacatatgcaaaacacggattaacttgattgctcactttgagtgataaggcgatagatgctccaggattctcattcaaatccaaaggtatcgtagctatttccttttcatcttcaactatcatgtaggatattactcaaatgaaaaggcagagaacctgtaggattgcttaaaagatatagtagtattttgcttagatggcaaacatgtctattcacgatacgaaattcattgttgttgcttaatcaattgcaagaacagatctacgacttaagtaattggaagaatagatatatgggatcaaagaaattagcaaagaatagattattgtgggataagaacagacctgcgggattagttgcaagcacaggcctacaggatcaaaggaacttggctgaatctaagggcttgttcgtttccgtcggattgcacccgaaattgttccagctaatcaaagtttatataaattagagaagcaatccggtcaggaatcgttccgacccaccaatccggtagaaacgaacaaggcctaagggatttttgcaggacgttacctttcaagcagatccatgaatgtgtagcttgccaaggatgatacacgtgttgggcggcgaatggacggtgggcgccgtcggtgaaggacccctgtgcgccgacgggggaggaggttcgagagggttgttgttgccaacaataaggggaggacatctagaaggaggtaagagaggggtagcggcggtcggatggagaaccggaaagggtggtggtggcggctgggtggtgaaggggagaacctgtttctttccgattcatggcaaaaacaaatcgacgggactagtgatgaaaaagtgaccgcaaaacagatgaacgggagcactcgatgccaaaaagaccaccgacgttcatacaacgcaacgacatcgtagcttcgccacgagccatgcgcgaggaacggtgcattcgtcaaggatcgagtcttcgaaaattttacacgatatattaaacagcgtagggccggaccacattttctctcaccacttttcacgtcttctctcccttggcaattttaacatatgagttaacggacaaaacacattaacctcatgactcccgccgagcacagacgcaactgcaccagcctgaatcttcagatggacgacaaaatgataaaaaaaaacttggcttcgcccgggttcgaaccggagaccttcagtgtgttagactgacgtgataaccaactacaccacgaaaccatgtttgtgtttttgttgtaccttgtactgtaatatactatatagcacttcatgctgtgtgattacataacagaaggtgatcgcagtctataaattaaagactgcaagcctatcactatcaggccgattccatgcattatttcagatgctgcgttgtaagtgtacaaatccgtgggggcgtacagattgaggagagaaaaatgtaggcaggcacacactgtaaactagctagagtgcacttcagatcattttagcagcgtatacattgggaaccctcacctgctgcttgaaaagaccagcacacagtgcacacccggatgcctgaaaagttttctagttagtttcctcgtcacgtgtaagcatgaatccatccttcattctcaacctaaaacatctctatctgactattcttggatgaagggtgttttctatcgcgactaatgaagagttcctttcagaacagaagtactgttaaaaaaaatatcggaacagttgtgtgtgtgactgtcaaaccctctgagcggtacctcatcggacccaaatagtttcggaggtgtgtcggattggtctgacgacatgtggcgatctatacaacaataatgttttacctagggttttagctatagggtcataagaccctatgaatagtcgcctcatcggaccaaggtggatgggtctaacgagtgttgtgtgcagtgaccagaaagggtccagtggacgtcagatcatacgtccaagccaatgtgttgctccccacccccacgtatgggagacctttaatctcctctaacattttaattacttcatttctttatgataataaccttttttaagtaccgtaacttgagagcaaaaatgtgtagctaacatttattcataaagaaatgaagtaataacctttatgatttatttaaacttcaaaagctattgaaaaaatgtcaataattgaatcatagtatatggagagaaactgtatagggtgaattattagagactt

SEQ ID NO: 156 - DNA, 3640 bp, Zea mays
gatgtcttgaacatcctgctgtaggtggatttgctggagcctaatccagagcgcgatgaattcctcaatttgcatggtcattgtgattttccttcttagcggattgatccaggcgtcgcttgttagctcctgtagtaccgacatgtttttcctcctgaccagagcaaagaggtggggcgctaggttgcaaggggcttcgccgtctagccagctatcctaccagaacttagctttggcaccgttaccgacggctatggaggtggaaacttggaaaagcaagcgatcaagtttgttgcatggaacctacaggtcttgccaaggttttgagtcatccgtccactcctgccagagcgagcggagcctgagcgcgcgtccaaacatttcaaggtcgagaaccccaagtctgcccaagtctttaggtctactcaccgttggccaattaaccaggcagtggcctccacttgcattgtctccccctttccaaaggaaggaccgacgaatcttatcgatttgcttcctggcccattttgcaagggggaagatggacatgtgataggtcggcatggaggagagcaccgaggtgactagggtgagacgtcctgcccggttgaggagttgtcctttccagcccgttagccgttgtccaatcttttccactaggggttgaatatgaattttttggagaggcctagtatgcagttgaaggccaaggtagcggcaagggaacgatttgcagctacccgggaagggttggagaatgttcgtcaagtccatgttcgcacaattaatcgggtgaaccgagctcttctcaaagttaatgaccagacccgtggcagaaccgagctcttctcaaagaatttgcttgacataatcagggctcacaaacatcgcagcatgtgttacaccattggtatgtaaatagctcagatttgcaaacataggttggaatggttagacatgtgttacaagaaataaaaaatcaatgagacattgagagcgacagatttaagactcttactcattaatgcaatcacgtgatgataaaagggatttacaagctgtgagcattcagattacgacatgtgcattaaacatacacgaattctaaacaaattgaattgtaaatggcaatcttagcaggactatttctaaacaaactaaattataaacatcgttaagaagtataacatgggttacaagaaagaaaagatgcataaacttgtcctggttagaggataaaaagcaagaacaatacaccgaaacctgtaaaatttacatcatacaattttcaaacccccctaccttcccaataataagatgctttggtagtcctcgaaacatacaattcacattgaacttagacaaaaaaaatatctaatttataatggagggagtacatggctacacatggataatgtgataacggaaattgtatctgatggctgttgagcatgtttattacagctgaatttttgaactacagtcaacaatggcagttaggtagactgaacaagttcctaagtaaatctagcatgggaccaaataagtagatgatacaaattgattgtaacatactaataacaagcagtggtcaaagtggacctaaacaatcaattccctgtatattagagaagcttacttttatttggtatctgcactgctatcattgccatcatggtgcaaatacattatgtgcagtaccaatacaaatagacataaaataatttaaattgtgttaattaaaattcatagcctgcattgccattgccgtgatttaggctcttatatgttgaatacaaggtcctctttttcagtcacaggatattttgtctgtagtttcaatgatcgatctattgttcctttagttgtaatatgcaggttaggcttaatgcaaaaaactcttgctgctgatgcttcacatgtttcctctgcaatatattatgttggtgtaaatacattatgtgcagtaccaatacaaatagacataatataactaaaattcatagcttgcattgtcattgttgtgatttaggctcttctgttgatggctttcagataattgggcaacggtgtgtgtatatgttcagattcagaaagtgaggacaatatagcgtttgcagcagtggtaagttcatccttaatacccacaagcgaatacccatttgtagaatgttaaccatttagctcggaaataacaaccgaaaagcaatcaacaaggcttgcttgcgaattggcacattgtaattaacattttgcatcattccttcgtcaaaaaagaatgtgagccgtagtggttaagtggttcgatccctaaggcggcacatttttttgcttttcctccaggtcgtcgccctgtgcagggagggcctgctgatcagagatcaagagggaaagcagaagacacgttgtgccgggaggaaacacacgacgaagtagagacttagaagcaataagctaaatatttagacaactttaattcgagcactccaagaggtgtctcaaacaactggttaattcgttttatgaccaaaagaggaaaaatggccatctaatagttttgtaaaacaactccctaaagataagcacttgcttaatctccccctcaactcgccaacatgtgtgtgccttctgcgcttgctatttgcttgggtagttttgtaaaacaactccctaaagataagcacttgcataatctccccctcaactcgccaacatgtgtgccttctgcgcttgctatttgcttgggtgcccctcctctggttgtacctgcaccctcctgtccatctcgggaatatatcaaatacaaaccacgttttggtgcaaaccctgtgtaaacctactaaaaaaagtttcaaaaaattctaaaaaaaaacatgaatgtacatctcagcttacctcatctatatacaaaattttatgatcaaattcatcttactctagcagttacaaaaaagacaaattttggtgcatttgaactattaccgtttatcagaaattttgtcttttttgtaactgctaaagtaagatgaatttgaccatgaaattttgtatatggatgaggtaagctgagatgtacattcatgtctttttttagaattttttaaaactttttttagtaggtttacatagggtttgcacaaaaacttggtttgcattcgatatgtttccatccatcttctcctcctgctcgattttttttttgagtttttggaagctaccctcctatctctttccttaaaaccgcaacccctttccctccgcgccctcacttcacggctgccaagaagtcttcaacgcccgacgcgtggccgcacagggcgaggtctcgctcgatggccaggcttggccttcgtgccaccacccacccacgcttcctcaccaccgtggagatggatgtgtcgctgctgtggtggccctagcttctgcgtgggcccacgtgtagatgccgctggagaagatttattagggcgttcgatggtagcctcctcgccccagtacgctgacgtgcgcctcaacactgcccccacgtcccagcagcagcactaagggctagtttgggagccaaaaaactgaaggggttttatggctcccaaactagtcctaagacactaacgtcagcgtgttgctcccctcgtcgacc

SEQ ID NO: 157 - DNA, 5601 bp, Zea mays
  misc_feature (1315)..(1316): n is a, c, g, or t
  misc_feature (5391)..(5392): n is a, c, g, or t
acacgtcacgtgctgactggctgtacgacgcacgcgcgcggatcaatcgcctagcgctaccagatgacatgacactggctgagctctcacggtggttgcgccgccggtaccagaatgtgaagtgtcgcggcgcgtgttttttagcgtcacgggccgtttagcacgacgccacgcacaaaaggcagttttggccgtcgaccacgcacaaaaggccgtttagtatcgtttcccgacgcgcccacgtccgaggcgatgatgccggcggcctggagcagatcacctctcgactgcggcacggcacggcggccgtacagcgttttaccggcagcggcagggcgacggttacctagctcaactggcagagaccgtgaacgcgactgcggcacgcagacacccccggcatttgcggaggaaatcgcacggcggtccggtctgtctgtttggctttggcttgcttcggttgaggggtttcgctgcccgcgcccgtgccccccggggccgtgaatgcgatggcgacggtatcggggtacctggtgagtgggcgcggcgaggacgcgtcgtcccgtgccactgccacccgtacgtactatacccgtgccatggccattggccaacggcttccttggccgcgccagcggggcgcgtgcgtgtctttgggttcgacgtctccccctcccccccgctggtccggcgtggatcgccggctgcaccggcggctcggggtcgtcaggtcaactctgagctccgaccgtttgcaatctctcactgtgccagtgccgccactgcttgttcggctcaatcatttttctgcaaggttattggtaagctctagcctggaccctggagtagtaagtaggtttaccagggttgttgcggcctcataaaaggaggagtaggccatatctatcctccacaccatactctagtctctagtggagtggtgtgcgtacgtacagtacatcctccaactagccagtcccgtagccatgtgagctttgtcgtcgtggcgcgaagcaaagcagcacccagcaggcagccgccaaacgagagtcacacgcacagctcgcggcacttaacagtgcgcgagaggacctgccgacgccaaacaagagtcgatctgacagtggcctgtgggtggatgtggacagacagacagaccaaaaggcggttcggcgtcttggaacccgcgccgcgaacacgtacgttacagacggaagcatgctccggtccggccgtccgggtccgggtccagcggtgatgttgagacagcgagtgcgaggaagaagaaacggtccggaactgcggctgggctctnntcatggatggcgcgcgccaagtttccatgcggttgttgttgttcacacgccgtcgtgatcgactcgtcgcttagtactgtcgtcggtgtcagttgcaatacaacccatgtgcagtgggacgagacggaaaaggtgtgtgcgcagcgcagtgctcaagttcagacctgagcgcttgacgctcgagtcagagagattcgggacgctctctcggtagacgactcggtgtcggtgctcagtacccaggtgacccgtgcatggcatgggagtattcggtcgtctgcctgcttgcaagacgccatccacccacccaccggcggactaggcgtttggcgccacctccttgtagttgttggcttggttaattggacgagccgggtgctcgaaggcctgcctgcctcgtcatctttttgctgcgtcatgggaattgacccgcggtgagaccaatccaatccaatgatgccgcgcgtacggagtcagagctggcacagtcgcatgtgcattgacccgacgagaagaagataatcacagatggagcggacacaaagccacagcccacagcggcacagcacgcggctcaagtcagccgttagccggtggcggtacgtgtgtgtcagtgtgggcgggcggcggcgcggtacggccgggacaagcgtaagcgccgccgccgcctgcctgccgcacacgtcgcggagcatctagctagctagctgtgcgtctctgtcaggcagcgagtcggccccgctcgccgcgtcagatcggtggacgaggacgcgtggtgcgctgccgccgcgccgttcgtcgcctgcagcaaaagctactggtgtgggcagttgggcaccgcattcatctatcacgcaccaggttctcaaatggttcgagttgagatttagggggtgtttggttttagagactaattgttagcccctccaatttattccactctagtcactaaattatcaaatatggaaactaaaatagtgttatagtttctatattttacaatttatagactaaagtgaaataaaatggagggactaaaaatgagtccctagtaaccaaacactaccttaggtggtgttacaaactgtttcacccgatgactgttaaaataaaaaaaaaatcacgcaaggaatagagtatcgtgtgattaaaagctcgagcttattttagaaggtgtgctcttatatgtttacaaatgttttgaactatatatgagtttctgctttctagattcccgagaagccacacatatctccgagggatccaattacaaacaaattcagtaaagatttctaaaaaatatcctagcgctttagtttcatttaagattgaggaataagcacacacattttctttccatagattcataatccccttcaaacaatttaaatctgttacacagatatatggctgtttttatacaagaaacattatatgtaaatgagtttaagaaacctctaactatgcttgaggacaattccctgtgtcttgctctagattacatgcgcttggtcggttgtctattgaaggaaagatgttttaatggctagacatgagagttatttgagccttggaggtagattggtgcttatcaactctagattgagtaatctaatggtttatgatatactccctccgtctcaggatataagacgtaatcactttttattcttgtcccacaatataagacgtgctctctctatgcatacgtatatcgatgcagtggtatagagacaattaaatgcattttttggtctttgaaccagatgtggttacgccttatatactgggacggagggagtattcaataaaaaatgtaccattcaacttttgcagaattagataactagttcatttagatgccatgacatccaaatgaactagttgtctggttttgcaaaagttaaatgacatttatacaattaatcctttttgatatggcgatatgccttttaccttcgacatctattggaaagatggatagtgctagaaagcgttttttttggaagagggaaatatcatttgattagatggactaagatcactaaacctagctaagaaaaaaaagattaattacatacttgtcaccctgtttttataaaattagataggtaattcattttgatgtcattgagcgacatgaaaataaactactttataactctttaaatttggagtggcatacttctaattaaccccaaaccagatatatttacttaagcagcaggtctacggtgtcggccaatgaaaaatccaccatttttttggcataatagatggtgtggctataggttactttaaagacacacttttctcattttttttaaaaaaaacgaggaccgtgattgttcagttgaagccatgaaatataaaaactagagcctcatttttaggagatggctacgtgaagatttacagagtcagcttagaagattgcaagatatcgttctaaaaaataacgatggccagttggtaattgcgagtgagataaatctggaaatttccctaagaaactgttttgtatgggcaaagttttaatataatctaaaaaggcaaaacaaccgtggagtgaaggtcttcacgtggttggtattacaagatagaagataccctcttcgttttttttatttatcacgttttagtttaaaattaaactagcagatgataaatattcaagaacgaaggtagtacttactattctctctaaagataatctctgtacgaacagtacatgaaattatgttgctgcaggcgttatggtgttattgtttcattgcaccttatttaattgaaggctgagtttgaatcttagtcgttgactctaaggttcatactaatctaatcagtagaacacacatacttttatgttttattaaataaaatctatttatataatatatagaaatagtagcagtgtattatttcatcatgacaaggccacaaaggtgaatcaagcgcctcacgtttttttaaggaatcagcaagcgcctgtgtggtaggttgcagcaagcggctgagccaaagcgggtcatgaatcactgggccgcttgtgctcggctcctctcggctttgtttcgtgggccagaagaccggaccacgggccgacagaagtgtcgcggtaccggccaggcggccagtttcgttccgtttcgtacttcggccgtggatcacgttcacctggttctgtggtcaacttctcgggtaggcatccgagtgaccgcgtcccctggagttcagctcacacggtcacacctcacaccactcaccctgatctgtggccccaaccggaaactgtcacgatcgacgcgacgcgactcgcgccgagtcggtaccacgcatcgtattcgtagagggaaaaaaaaatcaactaggagtaggagggaagccccttccctaccatgacgtctggccactgacgtgcggggtagactcagactgaccccgcacgtcagtgccccatatccctgtccatgcagctgcgccaggcggcaaaccaaccagctctcgtgcgcagaaaatcccgcgccgttccccacgcgtcaccgtggtgcgccgcccccttcctctcccgctcccctccacctcgactaccaaaacactgatccggtcgctgattcgctggtgctgctgcagtttaggctaaacaaatcacccagttgacgaagagggagctgctgccgcggtcctggcccagctcgagagaagtcttttggtcttggcctcttgctgccgctgccccccaatcggcgccgctttgcttcctggtttccgcaaggttccacacatcagcatccgagacttgggatggaaggcacggcgtcttcttggagccgcgactagggtgggaaggaaagttacttgctgccgtcttcgcggtctttgcgcaggcagggtagagccggagatcagagatcttgatgcagacaagtccttcggcgtgcagggtaaatatcgcctcctttttcttcagatatatatgcttgtcggcgaagtccttcggcgttccgatcatcaacttttcttccaatttgtagttctctctaagcggaatccttgtgttcttgagagagagacnngactcagaaaggtagcgcagaggtgagatttgtaacctgtaataagtgacttgtggcgctgaagatcgaaagtcagagaaatcttgtggatacaagctccacctccaaggaatgataatggaccctcgtcctcgtgacgatcccaacctcggtgctcgattgcccaccccaaatccacccgcacctcacatgattagcttctccctcca

SEQ ID NO: 158 - DNA, 5501 bp, Zea mays
tgcaggaggccggaggaggtgacgacggccgcgccgctggtcgtgacgttgccgctcgcgaagccactgagcacgaactccccgggcgccgatccggatccgcctcgggcgaggaggagcaggacggcggccacccgcacggcgagagcggccgctggcatggtgtggaacgagggaggcagtgacctggactggctggcagcgatgagcggagccgcagcccgcaccgcaggtgtgcgtttgcttatctcaggtcagtgacctggactggctggctactcgttgcctgctgccggtgccggataactggtgtaaggtaatgggattggtctgctggtggcgtcgtcgtcatcgttgcggtctccatctcgatcaacctcagctggtggtccgcgtcgcgtgtggcgagacggtcgtcgaagtggacggcgccgggaccggggttggctactgctgctcgcgggtggcttgacaaggatggatggcatggtggggctactcacgacaagtctaggctggagaagtttggattggaattttagaattccaactttgtgtgcgtgtgtgtgtggatgccaactgctgagtcagcagtgttcaaacgacgaggcgctcagagcatcttcaaaagctcctcctctaaatccagtttttttttgaaaaacacaaaaaaaatgtctccaatagtttcctaaaacgctcctaactttttcatatcccttaaaactctcttatagctataaataagaggtttttttgctctccagaaataatatgccgttttaaggggaaatgattaaaatttatcttactaattatttacatgtatcttaaaattgattttgaggagtcgtttctagggatgctcttaggccaggccggtgctcactatccttagtaccgaccaggaccctacggtcgatagctgtccgtacagcctcgcgatggtcggtatccaccgaccgtcgactgccacatatctttttttaattggtctatgtcattttatgaattatgcaactttcatttttacatattacatattttatgtttgacaaattatgtagattttatttatgatttataaactatttaatttgtatttacttttatgaactatattttttaatattgcttagttatatatctagatgtaattgtattttagtaaaatgtgtttcatttcaaataagagtatgtaaaaaggttgatgtagcgctaaggtgactataggctaatagtaaaggttgtgcactattactatgaacttgcggacaatgatagatatagattgagcgatagctgatgtggcggtagatatagactagtggcattagatccgatcttatattgctagagatacacataaacctcacggtcatcggtggcaaattaagttactaccagtaaaatgccaactggagaaggtactcgttgtggtgccattcttgcgccatcctcgatgtcaaagaaataatttcttgcgttgaggatttcgacatcattactacctgctcccacaccatcccatgcggttgcatctccttcatcctctcgaccactggtcgcttcatgatggtggtgccctcttcaccgcctccccatccggccatgttcccatgccgatgctggaccgctccaccacatatccatagcctccggctatccaccgcactttaagtcggacgatggagggagcgcaacaggcgggccacaccagctatttcttttggaaaaaactactttcgggttcgagccctttggtttagcttttgatttttaggggtaaaagccaaaccaaacacaccctaaatcatttacttagtttacgatacagatggcggtgagcttatcatgttattttatggtgataaacaactatgtgtgatgatgagttgctatggaatgatataaacgattagtttatttttagtaaacgacgaagtagttggatctactggagagccagaatttattcaaacctggacaaattaaaaagattaaataatataataaaaatgatcataggaagtatttattaatcacctataaatgtgttactgatatttaacacgaggtagacttatcttcgagttttttatgctctgaaaccgccatgttatgataatattatcaagtattttaaataattttcacttagtgtatcacatcatcaagtgattgaaccattcatctgaaatcttgttgtgcattcacccttaatttagtttcattatagagaaaactctttcaaccaatgctgttgaaaatgacagtaataatgtcaatttctcccccacttagtcatcggtgaatgtgaatttttatgcattaataacttaattagtaacttagttagtaatgtagttcatagcttagttattacataactagttaagtagttagtgacctcttagttaactagtcagtagtaggtaattactttgatagttagtagttagatagctacccaattaatagcggtcactaaaacgatacttccaatagctatgctgccaacaatgatatattcttaattttaggcagacaaatacaaggttcaagtgaaaaaagatgcacttacattgttcttgttaccacactcaaactcaagcaaacctccacgtgcaaggataactagatctccacaatcacgtacacaaagagagttatcaagtcgttcgttggcaaaaaccaaacacatgattataaatgtaaccgatctgcctaaacaactttgcttatacaccaaaatcaaaattatctacctagggttgcaaatttcacataacataagctaactcaacacatataaaatgaggaagagatgaaggataccttgctttgaaaggtctaaggatcaaatccaagcttccaaggttgaatcaatagattagagaaggctggaagaattggggacagggagagggagaaagatgagaaataaatgaggttcgccccggctagtgaactgatgttgattaaattagagcatgacgtcacgagctatgacattgaggtactgccacgtcagagccacaataacgttcactctatttataacataatacctcggtgctttgacctataacgccaagccatataacctcaacaccattggtcacgacgctcacagccgagtccaaatacggtatcaatcccatcatggatgtaattgtaattttttttataaaagagaggtaaaatacaaaaaataccgagtccattattaacatgtggcaaagactctaagcagactaagttgtgtttgggcgtttctgtaaaatgcttctgctgctaaaaggcaaacaccaaccaacaaaatgacagaagcacgagaagctaccttttcacgaagtggctgcttttgtatagtatcattttcagttgttttcaccaatcaacttaagactttttgcagcacatagctcacattacccttttgacatcttatggtgtttttttcacaactcaggcttgaacaaaacatatacgctaagccgctaagggtctgtttggttcctttattttagggactaaagtttagttgagtgactaaattttagtccctaatatgtttgtttgtagggactagaagtatttagaacacattaaatgacttgtaagaagactaaaatgccctggcaaaaaggtgaaaattaatatggtttagtctcttttagtcatctcttgagggactagagactaaagcagtttagtcaccgttttagtcccaccgtttgactatttagggactaaatgagactaaaacagagggaataatctttagtccctcaaatcaaatagggcctaagttcactcagtaacaagatcagttgaccaccaagcacagaagtttctgataaagcatcaataagtggactacggcgggtccaatgacttatgacttctgaacggcggagaacttgaccagaggccacctaaggaaggccttttttttgtttatatatatagtggaagagtttctctcaattatttcagtgatacataatttatttatcttcgccatcatttctgtctttagcagatcatacaaaacactattttacacttccgctctttctcgcgaactttgtctcctctccgccggctctccctggcagaatgtgacacgagaaaaaggtgacggcgcccccaaagtcaaaggagggggcatgcgttgcgtgcatggcagtagtgtggttgccaaatttttacactttccagtcaaatagttctcagctagacgtacagttagactagatttaattactggagacttctgtggtcgcatttgcatgcatttagttctagaagcgtcaggttagctttacaaaccaaggtgtagctaggcttacagttcaaagtgagcgaagccctcgctcacttacgcggcagctgatactgaacgggagtcagtcaactgaggacgaaggccgggcaagcagagggtactgcctcgtcgtcgtcctcgtccatgtgcatcacgatctcatcaaggccagatcgaacaccgtatctatccactagctgagaatttgcacccacacccacccaccacgacgctacaccaaacaacaaccctctcttgcattgtatgcgagtcagcaggtagtagtactgcatatactgctacacgcattattcaataaaggaacccaattatctatatacatagttttgtaaataaagaaataaaacagaaacaaattcgataattaacataactcgaactgcaggccttccagggatcgatccctacaagactaacgtacgttattagaattgaaaacgcattccaaaatatggtctagcattctagcaactatatatacacgtagaccgatccaccacacccttggtatacgagagaggccgggtttcatgttgtgcgtgctgttcaaaaccttatatatgcatgtctcccgacttcactcattggcagttgggacgacgacgacgaccggccggccgtgtggtaaagcatgcaagatggtcattcaaggcaaggacccatatgatgaggaaatgagacgcagacatcagttgtcacacctcgcgatgccgtactcaggggttggaggtccggagctgaccatgctgggtagaacagtaaggttaggaaaagacactttcatgtctaggtgaatatggacaaacaagaaaagaagaccttgttgctagaaccaagagcactagcggtttctttctttctttcagacatttgatctatacggaggacaccatatggatatccatatgagtatagaggagggtgtggataagtaaaaggtgaaggaggagaagcgttggtggtatgatcatcactgagaggagtatccatggatggtcggtagggacatgtaggaggaggatacgtgtatgcaaggagaggttgtagactcaagaaatagagataagcagtgatgtataagagaaagagcatcgaagaagatctactccacattggcaagggtgttaaggtatactccctccgtttc

SEQ ID NO: 159 - DNA, 4001 bp, Zea mays
tttgtgacagatatcacaccataaagcattaaaacagtttctagcatgatgaccttcaaccccacacttctggcagaaagcgggacgaacaggatcattctcttttttcaaagtagatggagatatgatgggattacctgattgtattccatctcctgaggaagaagacattaaaccttcatggtgatcagatttcccaagccgcggcttcaatctgcagctaagattgcggtttctgttccaggattgagaaccctgggcattttctttttgtccccaacgatcccattggggattttgagggttcttgttcttcggatccatcccgccagacaccgtagaacttcggaaaccacccgatcccaatcgtggccactcttcttcaatcaccgggggacgcaaggaggttacgcaccacccgccatggaaaccagatcgagaggagacagggagcgaccagagacgcaataggaaggcggcgcaatgagggaaagaatgagaaccaacaaaatccgggggaaaccctaacctggttttggagactgctggagagcaggaaatcgcggcagagagctgatgccgcgactcttgggcttgggctaggaagagcgacgacacccccgagcgccatccctcccatgacaaacgggagcgacatggacccggagaagcgacgcgggagggcgcgagaactccctgggccacacagcgtactgtagacgacggcccaacatcctcctcacgcacaccagctcgatttgtgccatggacgacgtaagcagagacgtgggaggaagaagatgtcccggcccaaggtatctttcgcttttttctttttcgccattccccagctcgaggtgtatctatcataggggtaggttgtcatgttgtatcgatgaacactagatttcatgacgttaggcacaacgtagtaatcgatttagtgaacaatactttataatacttcatgatatactagtgtgcccatgtgtggctataggagcgatgacacgtatgggatagtggtctttagtacgtctgctgcctgagtttacaatgtcttaggtcccgaattttaggtctgttaaccgaataaggccttaaggcttaaggtgccagagatcgaggtcatcaggatggtgaacctttggctttgccaaagccaatgcaaggtatatcaccaggagatgtgcctcgtataatttgaaggtacattcgatgatacgccctttctcagacgtcgacagcatgcatatctaactctgtatgcaaaaaaaaaagacatatgaacgaagaattcgatcagcacacgcatgtttaagcctgcaccagccagccagccagtggctcagatcttgagacgttgaatctatccagtcaaagctggatgatgcatatggatgggatttggtcgcagtacaccttgtcggccggaaggaaagctagctctgggacagcgaggaggagctagctgaggcctctatcgggcgaaaaggagacgagcactgcccttcgccgctgtcagcgcagcggtggagcacgatcgttttcgagatgagaatgagatagacgacgacaactgcatgcgttgatgtgccatccgactgtcactcgcggctaataattacatccatctctgcaccggccgggccgggccggggtggtttcagtttcatccacacaaacaaaccacacactgcagatccgccggcatgtgtagttgcattgcattgcattgcatatcaaagcttgctgaagattgattgatgctggcgtggtgtagtccatgcgttgccgacagcgtgggtcgtcgacggatcggatgatctacactgcatccactccacgcctttaatttgcggctagctccacttggcgggtccttgatttggctttagaagagtcagtgcctgtctgtgctccaactagcttattcaagcacatgaaacaaatgcgcgcggcagaaatctgtacagcggccaggctcgatctgtgtggatggatggtcgagctgattattagtgcgcgacgatgcttaacgagcaatccagatcgatctccagactggtgtcgtcgactcgtcatgctatattattggcaattggcattgtgcttttcaggaggagatcttgcattgtgaagctactatcaggctttgaccaaatgctgcaaattaagccagaggtcgttagtgatgaggcctgaggggtgcagtggtgtcactgtggcctgtcggggtagtgcagtggtgccggtccacatgtcggccgctgccgcagtctgattactatttgtcaatggccatgcatgcgcctttgttaaaaagagagagagagagagagagagagatgcgcaatctgattactatttgtcaaagtttcctccacactatttttttttacctccacaccatctctctagcacaccatgatatatacaagaattcagtcaggctgtggtatgtggagcatgcatggaaaccaaagtctcatgatgggggcgacatgattagttccaagtttagtggacaatctcccggtcaacccctggcctacactaaaaaaaaaacagaaccctgcatctagtctactagagaggaattggaataaatatttaggcctagtttggatactcttggattgaagtggtttgaagggattagagagtatttaaacccccaataagtcaaaaactctcacgatacatctcaatccgctcaattcccccttattcctagagtacccaaacaaagccttagcggcagattgcattccagccacacgtgagtcttttctctctctatatatatattaccctggccacatagtgattttctagcatgatctagtagtctaacctctgatggggacaagcatatatatgagtagtaaggtggcgcctacgccaacgctagttattaatgggatgaattcagagaatcagctagcacacgtagtagccatttcttttaattaaatgcgagaatatgtatgtaagcattattggagtaccaaattgccaagacgataatctatccatgacaggagcatcaggcaaagcacatttgggaccagggtgtgtggcagtggaagacagtaattagcgagagttaccttgttgctcttgcatccaacacccactggcttatcctagtgcgcttcgtatcaatccatcatgaaaacctagccttgacagccagggcctgccacgccataacccattaatctcataggtgcttagttaaactcataccagctacttgttttctgagcgtgctaggtgcaagccctttagtgagtacatacgcaagcatttgctctgtgtttatatgtccattttcaattgtaataccatagattctctcttttacaacttaatacttaataccaatatgtttggcaacaatacctaccttcagggccagccctagggccatgcagcggaggcgaccaccgggcgcccacaaaagaaaggggcccaatatctaatagaatagtatgattgatgttaaattattatcttactaaatcacatagaagctctaatagaatagtaggattgatgttaaattattatcttactaaatcacatagaagtggaacagacgatgcacatgtctggctaaagcgtcggttaaaggcctcctacaccgctgcacagaaccagtctcgttctcactgtcgtcgccgatcgcatgtcatacactcatagcttaattagttttatcgaaattataattattagaatggaattcaattccaacgaaacaaatgaggcttaagggaaattagtttattttcagatgaaaaacaggaacttcttagaaaaatgaggttgccaaactaacactaaatatattattattttggtcgactttatttcttgataagtatcagacatattaaattgaatatatatcagtgtatttatttatgtttttgcaagtaaaactaacacatattatttatatataaaaaaattatacaatatagaagacctat

SEQ ID NO: 160 - DNA, 4700 bp, Zea mays
cccaatgtgctggaaagtttgaattagttcatacttatggcttaatccttgagacaaacataaggatcaaccaggtagcatgtcctcatcgatgggccagcgtcggcctccgcacggaggcgtcgtgccggactgatcgtcgttcatccgagcggactgatttatgggcatgaaagagagggcgtgaatttttccatgggataacagtactccataaccattatttcaattgtattctcataacaatatattgccttcaatcacatataattacctagttcagtgaatatcttcctgctagtctgctttgttctgtcttatagtttttcgatgtccaggagagaggagaaatggagaaaagcacagttacaagaggactgccaatcgccaaagtcgtctactgctttctaaacgatcccctatcagtgtccttccattctccaaaatggaacaaagggacgaatcatatacttaagtcccagctgaaaaggctgcagtcggtcgtagattcctcaaatgggtctcctgcagctggttttgtcgacatggcaacctcctgcctgtcgactcctggttccaagatatacacaagcgaggaccaattggataatggtaggcggtagcgaccatttgcctgacgaacccttagcggaggaaaaggagtcggagcttctcgcgttgtgagttctcaggagctgctgcccttcacatctacaaatgtgctgccatgccattggtctgaacaaggggagatgagatgcaggataacagacgtgatttggacgttgctcattcagatctctatccctccgtatttttttttatttttcgtggtttagttaaaataaactagcgagcgataaatattaaatcaataaataataaaaaaacgagcgatagacaacatagtttacttatcaacggtgggtgctacgtagattcacatcttgcctgaaatttatttgtttgggacttgtgagccgctagttactgcgggcttgatagacaacgctaaacttcagttgcatttcaggattttagttcgttgtagggagaatgagctcatgggtattgttggtcgctcgcttgctgtgtatgacatcatgacatccttatatgtccagctcagctctattactctctccaatagaacgtgtagaatagagtaaacggaactgtataagatactgtttaacattgtttgtagagagaaatttaaaattaaggataagataaataatcgatagcctaagtcaccgtcagtggaacatgtcaactgttatacgatctgaattctgataatgagatcttgatgatgggtggtaaatatagttcaatcatattacaaacgaccactatttcaagaaagaagaagatggcatccatgtgctcatagccgcatagaaagtaccttgttattttttatttatcgtgttttagtttaaaatttaactagcggacaacaaatatttgagaacaagttaatatatacaaattcaggacaagttaatatatacaaattcaggctcagccacgggcacttaacaatgaaagaacttcaacaagattatttactttctactacactcaacaacaattaataaatcattatgacttctaaatatcatttttacgttaaccactctgaacctcattgtggtgtctgaatacttaaacgagagccagagccaccacctacgagaggctggaagtagagatggcaatgggtacccgcgacccgatacccgatgggtatttactccattagagtatgtatgtgagctaaatattccacccgtgggtatgttattgggcaaaaatctttacccaatgggtaaatgggtattagaacgttccaccttcacccatacgcgttaacccgtgggtataaaatacccaatataaacttagcccaagcatgaacttggactttagtcatctatctttttactatttaacaaccttttaggccataatgtcatagaaggcttaacgacaatttaatgatcatgtaatggaacatgtaatgtgctatatagtactgtcctagtgttactattttatccaattatctttggtgtgttgaatggatggttaaatgatgctataaattctgtaatggatttagatggatatacttgacatttgtgtaatataatattttgatagatgtttaatttttgtgggtacgggtgacccgatgggtgactcatacccacgtgggtacgggtatgggggtaaatccatacccaccagcgtaaatgggtgacccgatggggttatttttttgtcgtgagtatgggtatggggcagtaatacctggtgggtatttacccagggaacgtatctggtgctcaaaggggtacgatgctcatgtgcacattttaaatctggtgcatccatttcgcatctaacagcagcaccaattttgtgaagaacccttccaccttcctcccctggtgggaggggttcttcgtaaaattgctggtgtcgttgaatgcaagatagatgcaccagatttaaaatgtgcacatgagcaccgtacctctttgagcaccagatacgttcccatttacccattgccatctctagctggaagcaacggtgccgccggagatggagacggaaaaggaggcggcagcggcgaggcaggcgaaggagtccctggagctggcgttccagatgtcccagatcctcgaaaccggcctcgaccgccacactatgtcgctgctcatggcgctctgcgaccgcggcgccaaccccgaggccctggccgccctcgtccgcgagctctcctccgctgctcccccaaccgccgccgaggctccctcccccgtgagcaacgccgccgcggggccggccccggcaacagcgtccatgttctcctccggccttcgccgtccctagggtttgtgatgtcccttttttcgccggtgagactgcttgccagttagtcgactagatcccgcagtatgcactcagccgctgtgagtgcctgaatgtagtatgttcttatgttttgactaaatttgtgcctcacaagaagataatggttcaaccaaatgccatatatcacgttactgcgtagttgtgctgctacctgcatttggcatcaagattcacattataatgtctatgtttgtgttataccattaatttgcagccaggtgttttgtacaaatagtcaatctaggcatgggcatatgaactgtgggttggttattctttctatgcaacatcaacggttgtggaactttctatctcttgttctctctggctctgccacccttttagctacaccttgtcgggtagtggtgttgccatgatatagatttgttgcagttactagtagattaatgggatgcttgttgcttggttgacgaatgggttagtacatcatattcccactcctaacttttttgtttgatttgtggaatggaacggattgatccatcaccacatcattccttataagctaataattagtataaccgcatgccactaaaattcatgggatgaacacatcatggaccacctcgcctctgtccccctccccccgactttagtgtacataggatttgtggcatccctttcttccccagtgagattgcttatcattagtcaaagtgtcaaactagatcccgcaatatacatttagctgctgtggatgactgaatgtagtgtttccttctgttgattaattttgcatcttggcttatgattcacacttcacaagcagataatacatggacttgtgtagttcctagatgagttgggtcaaacacaatgtgcataggttacatgactgcaaacatgtgacgcctcctgcatttggcatcaagattcagagtacaatctcttcttgggtcacacaattaatttgcaatctggcatttctacaaataaagaatctaggtatgggcatgtgaactgtggggttggttattgtttctatgaaatgggaatagttatggtagtatgtatctcttgttctatatggctgtaccttcttgactagtggtattgccatggtataggtgtgttgcagcaaactattagattaattgttcatgtgctttggttgagaatgtcagcacatcaagtgttctgtcacaaatcaagttttttgctgtagtagactgcagacaagtgactcagtcgagtctagagtgacacaagtttctcaattgtcctcagaacagttgatcagatatagaggtgataatccatgaacaatcgattgatacgatttgaatattactgtctttttgtgtgtttatatggcagcagatctacctgacctgcaccttatgtagcaagaatttcttattgattgcacctgtagatttgatacttttgtgtttgttgggacatagataatcaagcaatgcaccggtttctttgtctccttcctggtgctgtgtagctctcacagtctattggatttcaagtttattggttcttgtattctgatgaatgtttaattataggtctgatgcccgttcccttccgttacaattccaaactgtaagtcgttctgcctttttaagatacatagctgttgttatgtttgtagacacagtgtgtacctatgtacatagcaaatgctatgtatctagaaaagccagaatggcatacaatgatacaatttggaacgaacggagggagtagcgtaatcctagattcatatctcaagagca

SEQ ID NO: 161 - DNA, 9501 bp, Zea mays
  misc_feature (1465)..(1465): n is a, c, g, or t
  misc_feature (1467)..(1468): n is a, c, g, or t
  misc_feature (1570)..(1570): n is a, c, g, or t
ggtattaatcgattaggatcgccgttacttctcggatatgaagactggatcgctgcccttcatcgtagataacaagcgaaacaaaaatttgattttaaaagaaagttagtgtaggataagtgaatgctctagattaggtaaatctagattcaggaaaagtatttaacttgtgatgtaaaactttggcataaggatccactactagtaagcttttctgcaaaaatgagtgtttgaaatttgataagctttaccttgattcccgacaaaccaacatatccttgagagtcttttctttagtcgggtaagtcttgctgagtaattccatactcagggttttattccctgttgtttttcaggttgtaattttgttctgttgtggatggtgctaagtgccggtgggctcggccttcttatataagtatatcccttctatagtttctttaatgaggattgtcacttaagctagcatgtattttcaaatttacgaatactttataacatttcaaattgtaattcttttgaatcactttcttttgtaatcttttgtaatcactccgatgaggtataataatatcttgataaacttgtaatcattttgtaataaaaaatttatttccgctgcaagtgtttgtatgtgagttgtgtttatttaatcctgcgatcttggcggtaagtggtttatccggggtccttgggacactcggacagatcctgttaagttgtttggtgcacatgcatacccgtttgaggtccttgggacaaggacagatgcatgtgggcccaataacttgggaggttctgccacataaatattcactgattttgcaggatatacaggtgcatacccggcataccctgtgtgttcgccactggaagcgggtgctctcaaagttggacacaaattatcgacaaagttcttcccaatattatatggaggcctcagggaggctcataagccattgtttggcagaaccaatcaaggcatcatgtaagtagtttgccatcacccttccatccccgcacaatggtgaggatggcagtgacaaagatctgtaataactcggtgggattgatagtcccatcatacttctttcaaaggttgggtgaaattctatagacatggtgcctattagaacactagggtgagcgtcatatagccagcaccggtgggatggaccacctaaccaacatggcctataggtggcgccgactccatagagttgaaaggacctagatagctagatggagtgaacggtcaataaaaatattacataaaccatataatatcaggtagagccaacatatatgaacatggggaaacttctaggttatttctttagtcaaacttggagcttgtgtgaaagatatgtatgaggaaaagggcgaattccagcacactggcggccgttactagtggatccgagctcggtaccaagcttgatgcatagcttgagtattctatagngnnacctaaatagcttggcgtaatcatggtcatagctgtttcctgtgtgaaattgttatccgctcacaattccacacaacatacgagccggaagcataaagtgtnacgtccccgttgtggcgagtctaaactaggtgattcacgcactatctgacattacaaacagaacacataaagggcactacaagaatcaagctagggatacactcctacaagccattattccactatagttgctatttgtgaatctcccacaaggaatgagcacaagagtccctcgcaagaatgatcaagtcgacaacaaacaacaaagtcgctcaacgatatcatgcttccttcaagctatctaggtgacaacaaccaccaagattaacaagaatattgtagttcaatatgatcactagtgccactagatataacaactcaatgcaaattattagagatcactctcaaagtcactttggatgaaacactatcactagtggtgagtgcgagatgttttcttaggcttactaggttgtatttcaagttgggaaaccagaatatccacccccaaacctgaccaagctctatttataaggaatatatattgtgcacaagaccaccattgtgcacatatgcacaaactcaatctgaaccctttgtttaatgatctttggttgacatgaaaacatcttccgcactctccttccctaacctagctacatatgtgcaaaaacaaaacatgctcgatcgaagattgttagatgaagggtccagattgagtttgtgcacatgtgcacgaaggtggtcttctgcacagatatgttgccctatttataaggtcccagggggaaactagccattgaacttttactatgttgattttagggttgttggacgatctaatacccaccaacggaccatgtcgctaggttccgacgactttagaacatgccacatattagctatttcaatgttactattgtcgcactgatgattgctatagtatatcgttcgacaccctctatctgagaaccatagaaccaaagtatctagagtctgatgcccttcgtaaaaagaccagagatctaccgataatgtctgaataatatgatgtacgtttttagaccaattcataggatatgatggtcatgttcccattcaactagtatgcctaatagtgggtacattcaatgtatagtgcactcattcgattcgatgcacatgtttttcaattgtcaaactaattcttcagggtccaatgctctattaaaaatgaattgagagcatttgtgtcatggtttttataggtaccctatacatgaggtacccactcttgctaggtcaagataagaccccaatgaatgccattaagggttcatgggtggccagcccaacacgggggtaaggcctactgtatgaagtcatggcctagcctggactcatttcctgggctagaccgccaccaccacaagcacccataaagggaggaatcaacaacttcagctatatatatggattcttgcgagtggaacccggacctcctcatcggacccctttgagaaaggggtacagagggtctccacttccatgggaagaagacactctctggttgtagcactgaacctccgggatggttcccgacccattatatgccatccggacctcaagccaagtggggtctggtgccgccacgtgtctcgatcgatgcagttggatccaggccccctcgggcacggtccggggccctagccagagagggcctgggaatagagatggcaatgggcacccgaaacccgaaacccgatgggtttttaccccattagggtacgggtttgggtcaattttcatacccatgggtttgttaatggacataaatgtatacccgacgggtttatgggtacgggtttgttcctatagtacccaaacccgtgaacccgtgggtcttttaaacccgaccaaacctagtgcatattgtcattttattttataaacgaacaacaaacttgttatctacctatttacttcctaatttttatcaaatagtgaatgtataagtagttggtgagagtgttgcttgcttgctattatagttattactagtgttatatatgtggtggatgtataacctagtgcaaggtaacttgattatacaacttattatttgtatttaatattctctattaatattttcataccaaatcatgaactcattgttcattacataaattttggaccatgatctcattaatcattacgatacttattgattataaaaagaataagcatattggagataaaacccgcgggtaacccgtgggtacccgctaacccgatgggtacgggtttgggcaaaatttcaaacccgtcatgggtacgagttttttaatgggcgtaaatatttttcacgggtacgggtttgggatagcaaaacccgacgggtttgtacccgttgccatctctacctgggaatgttttgttcccacatattcctgggtctgccccctagtccaatatagaggtccagtgccgacgcgtggccaaatatgtcttgcgtaagccaccagacagtgcctgatgtatgcctctgacatggggcccactagcattaggtacggataggatgcatacttaccctcgccagtggcatgtagcatatcccctgcattaaatacgcgcgacatgccaagcctgcaacttgtgaattttactgttacccgaatgttaccaaggcaagactattgacccaatgtgccgcttaggcgcctttatttatgacttcattgctccttgtgcgttaccgaggaatgaagagacaggtggaggagatgggacaaaccatccacccctacgcacggtagagtttcagactatgccacaacctactccattagttacgcctcgactttgattagaagggacgagaggataggatatcaagagcgagcacaacgaccaaaaggagatacacacttaggaagatctagtgtcactagacttatccgacacctcttgtcctactttgtaaatttctcctgggcccacctgtcgggaccgtatctcccatgtaacgtgtccccctttggactataaaaatggggtggcatttgcgacacagagtggaggtcaattcacactcagaccggtgatttataagctttcaaccaataaaacccatagtcgatgtagggtattacgcaccagtagcctgaaccactctaaactcttgtgttctcgtgttcatgcattaaactagacaaatcccgacatccactatgagtttaatgcatagttgatcgccaatggtgggtgcgctctgccacctagccagagggttttttgcctccaacatttggcgcatcaggtagggaaggctccagagcctggcccttgattgatatgacactataatcaccttccggcaagctcggccaaggcaagctcatcgatttttggcgcaagatggagaagcgatgcctcaagtgctcgccattgatcttaggtgacgctttaacaagcgtgttgttgctaacaagagacaggtgacagaggcctcacctacggcgcttgaggttgcctccgctagcaccctggtaggctccgttgcgcctgaggtcgccaccatcgacctccaggtctcacccatggcgtttgaggttgcctccatcagaaccctaccagttccaatgtgcctgaggtcaccaccatctacctccagccgcacatagtggtgttcgaggttgctgttgtcttccaacaaccaaacacatgtgaggttgaccccaccggtcagccactatgttccatggtacatggagccgtcactcccaatcctaggggtgacttctcccacctgctaatagcttttaggaagccatgacagccacctttgtaaacatggcttccttcatggaatccattggtagggtgtcatgggccacgctagaggttgcatggcttgctgtgccggcctacgccctcaccctctagcagaagaagcggtcctcgtcgtcggccatcaaccaagcctcatggcatgctcaggctccaaccgcactagtggagcctagcaaacaagccagtaaggtttacaccttcatcaaactcatcgtggcgaaggtggtccaccaactgtggtgagcactcccactcaccaggggcctcacaaaggcgaggccaagacctgcgttggctcgcagcagagtcaccgccttcaaccaaactctatttgtgacctctccagtggcatccgtcagtcgagatggtcccccctaggggcccaccactcgtataaatggtgtttcaagggcaggacaatgccatgacctatgtggtccactgcgtcggcctactacttggacccgcatcaccaaggcccagctcgtcggacccatggtgtttggggtagccatcgtcggctcccaacattctatgcctacgacaatcatcaacccaacacaagcaattgcttacccttcgaggctgaaggatagcatcatcttgacaaagcaaaagggagtggggccaacaacgattacaacgacatcaagattgccacgacaaaatcattccgtcggccatggagaccttcatagggacattccacacacttcgaaagggttcaatactagcaccaagaaccaactcgtttgccacaagctccatggcatttagggtagcagccaacgaccttcaccgacctttgcctttggccatcaccaaggcagaaagggacactacttactctttgagtcagacgcacaacagagctcaggcggtttaggttggcctcgttccttccatctgtaaggtagcatgagaataagctattcctttgtaataggatagcttttctctatggtccaacctggtaagtctcgcccacataaacccggcctttggctccacctgtggtctagtctggtgtgggccacccttataaacccggtctctggcattcattacacataacttttataccaagttatgaaagaagaacatgttctcatccatcagtttcttttcctttttacaaatcatgtacccctatggatctaagcttctgttgtaatcctgaaaactaggttacgtagcttcccttgcacctagtttgaggcccccgcttgatgatgaatgaagaatggattgctaagggcttggctaagggaggagtccacattcttcagggtggtccaaagctgggtagccacttagtgtggtcccataccataagcctacaccttccacctctccagaatagttgacttagtaccttctggactaagtacatagggatctagactccattcagattcaaggggccggctccaaagctaggatcgacaaggtgaggccgcatgattcagaggattgagtacaacaaagtaaaggccctaagggaacactacttagcatcaatcctataccacattcaggatcgacctctggtttgatggtagcctagagcaaccgaagctactagatctccagggagaataagtcagctacatcgattggaggcactaaggcaagaagcaatctggtaggggtctggccctataaacctagtctgctaatatatgacccaaagtttggtaaggttgctcgcgtaaacccaatctcttttgccttttgtagtcgagcccggtaagagaagcccctataaacccggtccctcacaatctctacgcaaggtctcacatatccagcaatgaggaaaggtgcgtagtcttggtgaatcagctctgtcatcatacccttagccgagatatgtttgtccttctaccccctattgagattctcagctttgttgttatcatgaaatatggattatataactggcattgtcgcttagtttatctccccacttaatactgaacaaggcataggctgacaacacacatgttctaaaggaaaagtccacattctaagggtggccttgagctggtagctacttagcatggtcccataccgtaagcctacaccttccatcgcccgagaatagatatcttagtactttacagaccaggtacctaaatgcctacaccacgttcaagattaagggccagatctcataagctctgctcgacaaaagcccagtcgcacaattcgatggattgagtacaacaaagtaaggaccccaagattatgctactagacactattcatgaaccatactcgggggtagctcactggtctaaaggtaaccccacatctgggacaaccttcagggagcccttgtggtaggggccaggaaagagaaactcttgacttcataccaaactggataaaactcgagagcaagaccattctttgtcttatgcaacaacagcagtatgccgacaagcaacccacatagcatggaggcagtaagtataatgttgttgcacaagactaacatttctagaacaaggcacatatatggccccacctacgggttcattgcctcacccgaggtgagtccaagggcctatgtcgataccgtaaacatggggtacccactccagctaggtccaaataagacaccaatggctgccattaagggatcactggtggccaacccaacaaggggttaaggcctaccatatgaagtcatggcccatcctgggcttgcttcctaggcaggatagccaccactacaagcacacataaagggaggaatcagcaacttcagctatacacctgggttcctgggcgtggaacctggacctcctcgtgggcccatcgggcccctagagaaaggggtttggaggggctccacgtccttgggaagaagacactctttggctgcaacaccgaacctccgtgatggttccgagcctagtatatgccatccagacctcaagccaagtggggtccagtgatgccacatgtccggacccagtgcgactagggcctatgccccttagacacggtttgggacccagtcagagagggcctgggaatgtcgtgtccccacatattcccagtcttgtccctagtccaagatagaggttcggtgtcgacgcatggccagccactcctgacgctagccactggacggtgcctaaaagtatgcctctgacatggggcccaccaacattaggtacggatgggatgcatacatacccgcgccagcggcaggtagcgtatcccccacattaaatacatgtctcgtgccagacatgcaacatgcgaattttaatgttacccacacattaccaagacaagactattgacccaatgcgctagttaggcgcctttctttattacttcatttttccttgtgcgttatcgaggcatgaagagacaggtggaggagacgggacgacatcatccaccctacgcaccgcaacgtatcagcctacaccacatcctactccatgggctatgcctaagccctgattagacgagacgagacgataggatattgggagccagcacaacgatcaagagaagatacacgcttaggaagatctagcaccaccaggcttatccaatgcctcttgtcctactttgtaaattgctcttgggcccacctatcaggccccaactcccttgaaacatgtcccccttggactataaaaggggtggcccttgcgacgcaaagtggaggtcgattcacactcagatcaatgatttacaagctttcagccaatacaactcatagtggacgtagggtattatgctccagtggtctaaaccactctaaacccttgtgttctcgtgttcattcgtcaagctaggcaaatccaaccgtccccgccaatggggaaggggcaggtgcgcgcgctccaccacctggcctgaggtttttttcgtttccaataattttgttcctatgtcaagtattgtaggtattatttcgatggttttgcttcaacaagctttgagataaggtttagactagattagggaagtcccctatgtctagtatggtcctgaagtatctattgcttgctcttgagagtgttacaagggagagcgtgaggttctcttgctggtgtgggaagaatgtaagggatgctaattggatgaaaattagattataagtctacttgttagttggcttggat

SEQ ID NO: 162 - DNA, 4701 bp, Zea mays
atccttctctgccatataatgacatctttggcatgacgagcagcaaacggcgtgtgtttcgcgagaaagaagacgatcgatcacgtgtgcaattgcgccacgctagacaacagaaacggttcggcatgcacacgtgagctggcacgaacgtacttggacggacgacagcccagggaaaccgtgcacgttatcaacgagtcgagtgtagtggccgctggatattcttgttttattcctgggaccacctaacagaggctcaccacggcccactgctttgttttatcctgctaggttgtccaggccgaccaccgggggtgctgggctattcggatgataacttacacgctgggcccatagcgccacgcccaacggcaaacgagccagcccatagtatcagcagcagtccagcagaatccaaccagcgaccccctattattagaagatacaaaaagagtatcagcatttcagtacagctaaggatagaaatgggccgactctggcctggctttggaggcggcggcggcctcatgctccccaagtcaattttggggtcccattttacaaaaaaaaaagagttttggcctcatgcttataatcagttttggtaaatcatagttatcaatctcgttcatcaattaaaatcagcgacaaagagtatatatgttctatatgaccatatatacctttgtatgcgtgatagacaatgaccttttttaatagaatcgatagagcccagcacaccagtttagttcatgaattaaaatttgataccagatgttaagaaaccctataaaaggttacgtcggctagtatcaaacatatgcctgagtcactctacctttctatataataaatttatgcccttataatgataacgagaagaaaatgagaaaaaagaataaaatatttcttgtttaccgataaggggaaaaaatagtctttgacatgtcttcattattgacggaacattcaaaagccggatcgacatcaagaaatgtttggttccagccaactaaattttagtttatcacatcaaacgtatattcgaataataattacagatattaaatgcagtctaattataaaactaactatacaaataaaaactaaaagacaagcctaatcaagccattatttaatattcataattattttaaatacttgatgtgacagttcggaacgaaacatctccttactggctaacaaataacaaccaacccaccataaaagagcatccacgcgtaaagatgcacggatcgggagcagctagcgcggggaagctttgcttggcgacgcatcgggactcagaaaatgggatctgggtcggcatatgctccagctctacgacgatccttcgtactagcaatcgtcgtcgccggtaacaaacatctccagacactagggatctgatcggaagggggaaactgtaataaaaaggatttaaaaaacgctactggaccccttacacgactgtaccgaagttattggtcgcgtacaaaaatatcccgacaagaaagagcatcgcaatcaggcgtctgcgtgtgccgatgggtctgcagcaacgatcgggccccgcctcgtgactggccaatcaggcatcaatggtcgatcgtctaaactggggaatctcacgccttcattatatttcaaaggaaggccatataaaaagcaattttcctagtacgcccatttccaaattgtaacaggatttaattttagtttttattacatactatctctgagaagaatacatacttttaatatcaaattgatttataaaacaatccctatgtgcactatagatagaccgtacgtagcaaataaaagcatatccacgtgaaacacgccgaccaaaaaattacgaggagaaattcctcgcatcatctcacagcaaggatcactcgagactactttgtcgttaaattccgtagatgtcatagtacaaaccaactcggcaatcggtcgtgtgactgctcccaaaaactagatctatctcaatgtgtgctacctctttagtagagcaagattttggagacactgctctccctatcgtcatcatcatgccgatgttagaggtggaagcatcaaagggcgcgcgacatcgagagctctctcgagattggttgtttcttgtaattttagagaaaatgaactttctattatataggggggacaacctttgtgattacccattacctttcattataggactaaacttcccatgatttattgactcatacacgaatggatatttgagatttattctatgaattacttggaggaatgtgggggccaaagaccagataatttcaacaattaatcctccaccaaatctcgaaagcaacacttaatcggctctcaagaagtcctcaagtaccgtttggcatatcaactttatgatggagactgtttatctttcatgagctttttagagaatttccacaactcacagatcacgaccaacgtcaactcataccctgcaggacgatatctcatatatataagccccaaacacattaagacaaaaaccattctaccttatagaccatagagtattacatcttcactagatagtgtaacataatgtgtactcttgttgcatatacaagtttttctagagtcccaactcattggatctcctatcataacgtttggtttgctaccgtgcgtaatccaggtgggtctcaaactcatctccttaatgcattatctatcatgttttgagataaacctttcgtaaatggatctgctagatttttatccatgtttacataattaggaactgtcaatccagaggtcatgcaacatcgatgagtctattgagattgattatttctcgtacattttggggagaatgccatcttattatatctaggaatatgctctcgtgattactgaaatgttttggtggttagatgctcaccacatattgttttggttgatataagctaagtgtcaagagatgcaaatggaaaaagtaaggtatgattctagccttagtaaattgttttttatactaacattattctactaagtgcaaagaaccttgtcaaatcgagagaaatcggattggagaagtttggctaagtccagccaaacttgcaccagctcgcggtgcaccggactgtgtctggtgcccaggccggcgctccggtgaactagccgatctcgggaaaatctgagggcgccgcggctataattcaccggactgtccggtgagccaaccgcgcccacgccaacggtcggccgcacgattagcgggcgacacgtgggcttcgccaacggtcaccaagtcgcaccagactgaccggtatgccacgggggccggtggctgcaacggtcaacttcgtcagaaaaggaaggaaatcacgcactgttcactgtctggtgcgcccatagacaccaggcaactaaagccttccaaataaagttcaaacggatcctagctaccttggggctataaaaggggcccataggcgcatggagcagtacaccaagcacccattaacattctaagacgccaagacttcgcatacacgtatttggttcatcatgatagtgaatcgagcacttctttgagttgtgactctgatgtgctgcttttgtgtgctcgttcttgtcttgtgtgcgtgttgttgctacactctcgctcttgtgtgttttgctattcctcccttactcttgtgctcattcgagatcatttgtgtaaggtgtgagagactccgaagtgtggagattcctcacaacggtatattattgagacaaagagaatcgtggtattcaagttgatttttggatcacttgaaaggggtcgagtgcaaccctcgtctattgggacaccacaacgtggagtagccaactattctacttaatcgaaccacaagataaaatcgttgtgtcaattgtctttctgagcaagtagatccaacgggggagtgcagagagtgtttgcaaagttccacggggaatggcaatggctctgttaatctggcctctcaagggcactgtacgggggtatttataggcacccgagtgaccaccgtcctctcgtaaggacgtttatgccctcgggtacccggactatccccaaaatattctcgcaaaagggatgttacataccgtcattacaggaaaggctattacagacgcgacccgtaatgtgcttacccacgcggggcccgttacagtgggccaaatcccacatgggcctccggacgcgatgaggacgtgggactagcagatttcgatggagctttgccttcgtcttgcaatggagaggacgacgccctcggctcgctcaggcgtggtcttcgctggtgtagcgaagcgacgaaggcatcgagcgaagggtagcgtcttcgccttcgtcccaacagagagaaaattgaggaacatatgaggctcggaggcttgtgcaatagaatggatggttcagattgaggggagacagaaccacagaggcaggctactccttacagtcttaatatagtagtaaatattatacaaatctattaattatctaaaacgaattttaatttaatataaaagaattactccatatcttagataatgtttttcatcggttacattcgaaaatgcgcagtgccagtgagataagattatagaccaacacttgcaacataaatactcgagacaaacccacaattagataaatatctatattattcaatgcccatcgga

SEQ ID NO: 163 - DNA, 4301 bp, Zea mays
caagggcacatttccctttcaatgctgaccaaaatagtgaattccatagctaattgtaccatgcaagtagcgcataacccactcaagtgcatgtcaatgatcagtcccggggtttgacatgaacctgctcaatttgctcacagcaaacgagatatcgggtcttttgcactagcaagatatatgagtgaacagataatatgagaattatctcaattggtctaaaccagttctcttgttttttcgcattgtcacactaggatcataagatgttggagaaggtttgcaattaatgaagctaattggcttcaaaaacctttccaacatactgagactgtgagggagtaattgcaccatctgccttaatcagcttgatgtttagaatcacaccagcttctcctagatttttcatatcaaacctctttggtagaaaagacttgaattcattgatcacatcaatgtttgtgccaaatatcaatatatcatcaacatataggcataatataactccttcgcccccaccatagtgataatacacacacctgtctgcctcatcaatatggtaaagcctacatatgctagtgtcgtgtcaaacttctaatgccacactactttggttcttgcttcagaccatataaagattttaataacttggacaccttggtctcttagccctttctacaaatccatcataagcattgtatgacacttgcctagtaattgatgccattgtgtaccaagggccacaacacatcaacactcatcacaaagaagcaaatcagtcataacacaaagacaaacaacacaagcatactacaacaaacatcgcatttctataagttccttttaattagatggtggtctttcttgaaaagggaataactactctccaaggtcgttgaaagacgaggagaagaacaagacgtatgggaaaggagcatgagcacaacaaaggatgtagttgaagcaagacttgcaaagcggcaaaggagggaacaaccatggacgggataggtaaaacaacactctcaaactgaagtgggagagagaaggctttaaaatgcaggtacaagataagcatcaatgtaaatatcaagagatgacaagggttaaaggtaatagcagataaacacacgacaaaggatgcagttgagacaaaacttgcaaggcgacaaaaggggaaagcaatcaagggatagataggtaaaacaccactctcgaactgggttggaaagaggaggctctaaagggtaagttcaaactaagcatctaggtaaatacataaatatcacaagggtcaaaggcaatgatagacaagggtgtaagagaaaagataaaggcacagaagaaccaagggtacaagtacaacaaaaaatggagttaagacaaggcttgcacatggcaaagaagaggatacaaccaagggtgagataagtaaaacaccattctcaaatcgagatgggagagaggagatttttaaatagcaggcatattgttgtcaagtactcgggaaccaggtacccaaaatagaccattcaaaaacgaccaaatccactgaccaactctgtgaggcggaccggatgaccaactctcggaccagatgaccaactctccgatgatgaccaactctccaatgatgaccgactctctagtgatgaccaactatcggatgatgaccaactttgccgaccaactctgcgagacagaccgaatgaccaactattcgatgatgaccaactctctggctatgaccaactctctgatgatgaccaactttctagtgatgaccaactccgccgaccaactctacgagacagaccgaatgaccaactcttcgatgatgaccaactctcatatgatgaccaactcttcgatgatgaccaactctctggtgatgaccaactcttcgatgatgaccaattctcggatgatgaccaactctgacgaccaactctccaccaatcagcttcggtcgaccaatcctccgtcgagcaacctagtgaggcagcgatctaagtccagcgctactgatccatgtcagctatgatgggacatcggaaggacgggataacacgctatatcgagcgtgcgcctgcacgagctggcaggtggcgaagggcccatgacgacaggagaagccacgccccatacgacaacactttgatattgattcgtggaacccattatgaagacgtcagcgatggactcgctacaagagccaaagcagcgggaaaggacgacgtcgagccaggagtacggctacgcatgaccctacgaaggacccaccacgccaacccggggagtagatctatctccctatctctttctttctctctccagtagaatacaagtcccactgtaaggttctacacttgagatacaaaaggacagggccccctccttcttcctacacaaacacaccagttgtaacacgctccacagcaatactatgattagcactacactagactagggcgcaagcctaaactaatataatcccccgtttcagatccatcgttgagtcctagcgattcaccattcagagtgagtccgcactagcatcccccaccgaaaaaaaatcttattgccccctggattccgaaaccacgacactatgctacacgaaacatacccaagaaagacataatcactatcattggtccaagcttgcactttttattaatcggcacattgactttcgccatgcactcccaagtgcgcaagtatgaaagtgatggttttcttccaacccacttctcataagaggtttttatcttctttgctcataggaattctattcagaacatgacacaaagtcatactgcctcccccaccataccttagataaaccacatgtgtctaacatgacatttaccaagtcagacaacgtacaattttcctctcagcaatcccgtttgattcagatgaataggaaagtgtcctctcatgaataatgtcatgttctgcacaaaaagcatcataactttgattcggatgaataggaaagtattcaccgccgaggaggatcctctgtggtcggacatctctcgagtcgattacctaggtgaacatgtagcatcaaaattttaaacatgtaaattttagttaaaatactaacaaagactaggaaattatcaactcaccgtccatgcttctttccaccaccaccgacatgcattgccaccggatcaattggtccatgccgccaatcgacgtcgtcgctatatggtgtcacatcatctcctacccttatttctcctacaattaagaaaacaaatttagaattggatgtttcaagactaactctaaattgtaaataactattcaatcattcagacatctgctgactgcaaaggaccttaatctatgtcgggtctgatcccctatgaccctggatgtattgtcaataggagatggatcaacaccaacttcaactttatgtatatagcaattagtaacagaaaagggaaaatatgttcttgaaacggtatttgacatatctcgctataagtcgacacatacgaatgtacctatcaccgccaaacgtatactcctaacccttattagcgaagctactcttcttcgtggacttctcttgaaattcttgagaataccataatcgacaaatggtccaaggacaatcttctagccacgagagttgtacatgcacatatgttgatgtatcaaaataatagtaatacattaatatttaatttcttgataaaacaattgcactagtgataattgcaagggcacaataacctaaagtaagcagatcaatgaaaatcctagatatgacatagaattattgtttgaactagcataatgtttcgtgaatttgtattatccccattgtagtgttacttataccataacaagagtggaatactatagaaccgtaccagacaaccgagcgggcgaagtagtggccagggatggggatgatggtggcaccggggagccaagaccgggacactaactaggaaatgcgggtgtcacatgcgcgagtgcagggcgttgtgggcgcgtgcgtcgctcgtgtaggcggcgcgagagaggcggtgcaggcatggcgcgactgtggactgagggcgacgatggagtgtggcggcgttcaggatcggtgcaagaaaacacgataaaagtgaaggacgacgattgtaggaggaagaaagttgagccacctctaaaaacacttaattttcgacgggctctggttgccatcgaaaataaactcataatttttagcagtttataatcagtcgtaaaaaatagcaacattattttcgacggataagtgacaa

SEQ ID NO: 164 - DNA, 2901 bp, Zea mays
aagactactaatcctgagaattgaacctagatcgtaaatgcagttaagagacaatgtatggagaatcgtatagagacatgctcttcccgaagagtctgtctctagtattttttaattagcactttagagactcctgaatataccccatattaaatgaggtcacgtacaaccccagttcgtttttcgagatgactaagagaacatatggtacaactctgagaacatggatcattaatgtagctaagagacaacgtgaagagacaatatcttcgcgaagagcacatctcttatattttttcacttagttcaatagagacctctcaatagaccacatgttaaatagggttgtacatatcctaatagacatttcacagaacatttctttagcgcctgcagtgttagtgtaaaggataatcactcgaaccagctcctagtgaatgctcaatggcctaacagagataggataacacctagttggattatatcacatttagacatgtaaaccttattatcagtgcccaacactaatggttacactaccgaaatcacgttctaagacactcggcaaacactattttatagttataaaatggtactatccaacaattagttgccatccctaaacaccgcatgatgagcaacagggcggctgccggctggccaacaacacttgtgggtccgcgtcacgtgggactcgagtgggcgctggtggtaccgttgggccggcaccgtgtgcttttggtggtaggaacgcacactgccctattgggctggagtgggccgcatccaaattgattcggtcttcttgttggaaggaaaggccgcaaagttcttaaaatcatcttgtttttggagggtgtatttttatataaaaaaagaagttaaataaaggtaattttaaaaaaaataaatcgcagtggaggcatctatggctggtctaagagcagctccatagttatgtaaattttagttctctaaatcacatatttaaagagtgctctaaatcacatattttaaataactttgagagtaaaaaaattatgggttcttcaatacaggttgtagctttattttgaatctatccatgtcaaagaaaagccacaatgtttttttaggggagttaataaatggttatcaaacgtagagagctaaatttaggaagtttatttagaaagctattggagagcaatttttagattaactatctaaattattaatttaaagagtcttttagggctactggtgttgctctgaccgtccgcaggagtactagttggtagtctcaagtctctcagctctcaaagcattttctttgctgtggttttcttttgttcttgcttgcttgtcaggtagcacggctgctgagacattactgtcagggtctcacggctcaaggagtaccaagttcaacgccggtgctgttttcttagcagtgctcatagccatagtagattcctaccacgcctacacctggcttatttctttggcatggagaattccaagaccaagagagccgcctagataggcgtaaagtgtagtggtgtactctgtctcacgtgcgctttgcatttttagagttcaaattttgtcataaaaactacatggtaaatatgttattctcgccaaatcccggtgatgagcgaagtcgaaaaaccgctcaaacatcaccggaattcgtaaatcttgaacggtttttacttcaaatttaaaaaatgaaatttgctattctcgagcggtattcgatgaagtcccaagcgtttttcttttgtgatttaccaccaaaaaatgctgattagttttgaaaaataaaataaaatatgatttataggattttttccattttttatagatattatgaaactcaaatttttaaacaaattttctgaaagtatcatcggggtctatttttgtctagtaccgctaataacaaattttactagtaactaattgttaccgtgcgggatttgaaaccatgcattggagcaggcgagcagccattggaagtgcagcccaggaagaaggaacaactccgacgacgagggatatttgtttttttagttagagaatgtgtattatggctttgttccactctagagtagagttactctaaaattctcaatggagcagttctgctccgaagtcaagatttatttcttgtaatcattgacaacatagataaatatctttatactttatatctacaatgtttttaaagaatttcatagcaccaaaagaggtactctaaaaattatactacaggttgtcataggattcttgtttgactgtctttatagatgtccaataagcacgaggcccgcgagcccggcacgaagcccgttgtttgggcccggtccgagcccggcacggcccggttctatgcgggcccgggccggcccggcacgaataagcgggccgggctcggacaagaaactaggcacggtgggctagcccggcacggcccgtttagctctaagcccgttaagcccgtttttttatactaaaacgtgcttaccggcccgcatagcccggttttcggcccggttttttcgggctaaacgggccggcccggcccgtttaggcccgctgcgggccgggctcggacaggaaattgagcccgcgtgcctagacggcccggcccggttttctaaccgtgcctggcgggccgggcccaaaacgggccgggcttcaccgggcccgggccggaccgggccgggcggcccatttggacaactctaactgtctttagtcagcttgtcttgaggttttgttctagaaatcattccaaacatccccttagttaattaattaattagaaaaactaaaaaaaatcaatgcctcatttatttgagaaatctgcaactctaaatatcttttattctttttaataaaaaatttctcaac

SEQ ID NO: 165 - DNA, 4301 bp, Zea mays
aatcaatcacaatcaacatgactaagacaacagcatagcagttacttgtttcagtcataactcacaagatatttatccaaaaatagtgatcaaatactttttgaaaagcataataaacactctacaactttggtattgtaatctcaaggtgattagacacttaggttgaatagtgacaaacgacaactctgttcagatttaaacagattcagggttgcgactacaaaaattcataactagagactcagacatccaattcatttgatattagactttctggaagtataattaaattatctacaaatcatttataaacaactcaggttgatttaaagtgtatcaaggttaaaatacactaggaaggttttgttgtctagatttggacagattcagacttcacacttcaaacgcctataacttaatcttcagaccaccaaaaagggtgatccaagactttttggaaagcttagaaaacttactacataacttttataatcaccaagaagtgattctatgtttaaccaaatcaaacaatatagttttcgaaatatgttctgacagtggacagaatacaacaatcctcttataaaattcataactctcaaactattaggtttattgtcatgaaaatttaacacaagtaatataaggaaattatctacaacttttttatagttgataaggactgattctaaactgaacttaagcaaacaatgcgatctctgaaatctgtacaggaattggacagattcagttactgaatttaataaaagcataacttctaaactatcaggtttatgactatcagattttaacacaagtaaggtaataaagttatctacaactttcttgtgaccacaaataactgatttcgacaataacttaagcaaccattgcaatctctaaaatttgttcagaaattggacaggtttagttactgaacttgtgaaaagcatagcttctaaacgatcagacttatgactgtcaaatttttacacgagcaagataataaagttatgtacaacttttctatatgacgtttctacagaaaacatattttacttgactagattacactcacaaccaaaactgtacacgcaggaattttagtttgctagcacaagagcactcaactcaataatcaattaaaattatggaaagacactaccatcaatttctcaagtttaaaccattatgacttagttataaagtttcaatttatattgagatacttaagcatttcaaaaaacatgcacgcttttgttttcttctaatttttcactaactcttcttataattatgaaatgggtgttattttagcaccatatgaaactatctaatttggggttgaaatttttatgaggcataggtaatgacaaatcatgactaatgtataaattttacatgctcagattttatattttatttaatacaaaaataacaaattattaacgcaataaagcatgtgagagcaagttaaatccaaaactaattattttgtgtggatgcatgaccatattaattttttaggctaatataatatcatgcaaggacagtggaacaccatttttcatttttacattcatatattatttataaaccatttaaaactacctaatatgcatcaaacaaggtaaatcactaacttaatcatacatgcaccaaaattcatgaaatttttaccggtcaccaagaatcacaccaagagcctactgtaaaaatttgaatccatttggatcaaaagagctatagatctaaaaataacaagcaaaacaattatcttttatatttttctcagctatagtatgacaacatctaactaacaaaataagtttcattaattttggatttttataattaaaaatttggagagaagaaagttcatttattttgtaaactagttttaaatacgaatttctgcagaaaatctttccactaaaacatgccaacttatagatctaatagatagataatttcataaggaagggaacaaaataagtttcacaattttaggagctaccaaactcaagatatgaattatagaagatattacgaaatctggaatttgaagcaccattacccttcgccttgggcccacacgtcagcctcacaaacaccttcttcaaccttcagccaaccaacagccaatgaacagccacgaaacgcaggggaaaaaagaaagggagggaagatccctgtgcggtcggagggggagggagaggaggaggaggccaagggtatccatttataggcgagggagcagcaaggggcggacacaaggcagccattgcagacgcaagctctgtgtattggtgggcatgggtggctgcgaggcattgcacctttccttatggacgaagcaacgaacacacagtgggcggacgttttcgtcgtttcccccttagaatcggatcaaggttactgcacaaaatatcttccttgatgtacactctacaaatcttgtaaaaggcttgaggtgattcgggcactggttagagagttatagacccacgaaaattggtttgtcagtggctcagaaatcagtggaaacttgtgaaaactgaatgtcaaagcatgtcaaacggaatcggatgaatgccatcttttaatatgttgtgcccctattaattattaacaacttttatatttgggaaaacttgagttgttcaacaaaaatgtgggaacacgagaagtcgacccgaacgatgctgatttcaaacttagaagaattcgaattctgaaattagatttttattctgtcttgatggcactgtttgagatacttagagattgaatcaaggcttagtttaaatataaaatttgttgtataacacaggttctacaatttttattaaaggtgaaacctcatatcttgaatataaattaaagtttcactttggtcaagttagcatcattataaatcttcaaattatatttttaagacaatcggggtatttctcgacattttcatggcattttctctgcatgaacccttaataacttttgttgtagagttgatatagagttgtttgagcaagatgacaaggttttgttgaatttcaaaattcgcatttgttcggacgagcatttttcagcatgtataggatttatcttttcatgtgtgtatttggttcgaacttttagaaatctttagatacacttgatagatagagatgaatgatgatatagagaaaacaagccgatttgcataagaattaattagaggttgacacaatagagattccgctggagaatgcggattcggacatagttcgactagcaactgtagagcgtttgattaaatgagcttcagatgcgaattataagttgagaatgatttttgagtttgcgttcgcgccgataattaaaagttttaacaggctccaaaattggttgtttctcacgatcgaataactccgaattcggtgaaatgtgaatgaatagtctggataatcagagacatacgcgagcgagaaatagaaatgttcactgagcatccgagattaggataaatatctcgacgtaacacgaactagacacctagggtgtcacacaaccctacctgaaagatgggcaagagggggcggcaatggtttggtggcagttcatgttaacatggggtggtagtcttggctaagttacctcacccagagggccatcaatactgacgtggaaaccttagcgggtggctttgtactaaggatattttgtgaaagcctcataatggatccctagtcattcacctcggtagtgtttactggtccgatcaacccaggctagatgggatacatggcttgtgggtaaagttgtaccacctctgcagagtgtaaaattgatatgtgagccgtgctcacggttaagagcaacctagaccctcatatgataattgaacttaaagatggacaataaatcgagatctgaggatctaccaatggtttgcttaagtggtttcacttaaatgcttttgatatactcttataactttgttcaattgggatacttgggatacacacttattagtaagacaagtgttgctaataaaatattaaccaactaaaatgcttaccgcttatccatagcctaccttattatcttgcattaattttcccccacttgctgagccccgaccataagtgagctcacccttgctaatattttgatcagagggtgatgctgaagacttcgctgatgacgatgatgagttttaagtctaatgttagggcgaaggcgaagacgctacccttcgctcgatgccttcgccgatctcgccacaccaatggaggcgaagcgaccggcagttt

SEQ ID NO: 166 - DNA, 4501 bp, Zea mays
aggaggccccctcccctgccggcagctgagggggtttcatggctgccttgccaacagaccaaagaaaattctacagcactggatggacgagactgagctgcgtgcagagaaatgggagtagattcatcacaaggcctcgcggtgtggggtaatttataggcggagtgaggggcaaaaagggaattcccctgccagctggtgcgcccgggatcgggttccaaagggcaaaagagcatgcgaagcgaagtggacacccgcggccagctgtccccaacaaagcgcaaagcggtgtcgtttggttggatggtttggtttggtccgagagctaaagattactttatttattttagctttatttagtttctctgtgagactaaaatatgggctaaactgtttgtctgtagtttcttaatgggtaactaaaataaacttaactatataaattctattttttatcatttctttatttcagttacactaatgtcggaaaaatattaaagagtattttggttctcttataatttatttaatgcgttttaaatacttttattccttagaaataaatagggtagtgactaccctagctaaaaggaaccaaactagcccttagttggggtgcattgtcgtcattatcatggcgttgattaaatgtgagatttagaataatggtgatcaaacggcctttggtgacaggctgcccaaccaagcctagaaaaatcttgcatgagttcaagtcggactcgtcgagtctgattaagaagtgattttgttttggatgacttggtttcaaatggcgccagcagaatctcgactacttgctccgttgaattattattcccaagtttttggagttgaatgagcagccgaagctggattggacatgcataaggccttgttcgtttctgccggattggtgggtcggaacgattcctgaccggattggttctctaatttatataaactttgattagctggaacgattccgggtgcaatccgacggaaacgaacaaggcctaaggcttgtttgctactcaatcggtaccgaattacaagttgttatgtaaataaatgcgctatttgtcaccctcatgcctcatgtgatggatccaatggtccattatttatattggtgtaatccaatcaactagacatcaaaacgaaacattttttttcccggatctgtatcatctaatgggtcggaccagtgaagcgctttttaaactgattgatgtttatactcaggcacttataagtaatttcatctaatattcatctattttaaggcattccatattacttaactcattgcatattgcttaagtcattttatctgttatcaactattttatcttattcaatcctttaattagttttttttaactaattttaagtcatttcatgtattttcagacacttaaccttactcggtgcttgttaatatcctttagttttcagctatttttgaagtcattccatgtgttttcaaatattttatattacttcatgtttgttaattgattgatgtttatacttagtcacttttaagtaattccatatgatattcagctattttaagccatttcatattattttaggtaattccttattatttaagttattttatctaattttcagctatttcatcatatttagccctttaattagttttccaactagcttgtaataatatcgtaaaagttatacatcggggataaccttttcataacggtgttgaacaccaaaagtgatggacggtctggctcaagggcccggacggtacgcgcccccacgatcagattaactcggatgattatccttatctgatgtgtggttatctatctaatcacgtggggtttgttagctatcgcctaggaacgggtccagacctccctatatatatgaacgggtacgaccgattgaaaccctcgaatacattgcaatcgaatcaattactttctttattatgtctgccttagaagtagatgtagcatagtctagttataactttccgcatatccacctcaacccctattcaactatacatcgtctagatccatcttggatgacctgctgacctcaaggcgactctaggatcttacccctcccggggggcaagatttattcatcgaattgatctcttaatttctataggactcgccgactctacgacgtctgaggatgccccaggtctagattccagcgaggaggaagacgaccctgcgccatcgtgaaacgttcgaccttgtgtgtggaccgtccggtgcgacacaagaaaggggtcgcttctgcgcccaggtcgtggaccatccggcgcgctgccgtagaggcactgtcagatggtacacctctagcgattggcgatgtgcagatcaactctaacaaaaagattttattttttaattaactctctgcaattctatagtaaatagattgtacatgtcattagagcaaccaataatatatatttgtggaattttgtagcttgcctggcactagtccatttatttatgtagttgttactttgcctctactctagcattacttcctatggttccttgcagtcgtcctgctgttatttccccaatgtatctggaaggaggttgccgacgtgattgaaggcattttttggatgtccttgcccttgcatgcagccgacgtgagaattgaatcgaagttatggtaatgttgcatgaatcaactccttttagcaccgcatgttgtcttaaataacaatgtcacatcatcctaaaactagataacaatatgtacagagttttaacccagttaaactctactatctcttatgaagctctctctatatctattctcataattgcactcccatattaccaagcatgataatatgccaccacatttaatgagtataaaactcttattgagaatatccttatatgagtgttagtaaccggtttaagacaggaaagacaacttattgagaagaactatgaaacatattaaataagggtacgatgagaaattagcatccaccttggtatattaaatactgtccaaaataactactaaaaggaattggagggagtatttgctcttaaaacaatgctcgtggtgcccttggctactcacaccggtttaacaaaactaaaatatatacaatacatttgagagtatgacaaataagcatgtacaaaaatttaaaatttaaaatatatttaatatatgtatttgtgtatagaggacgtgatttagaggacgttgtttgagaggaagaagatatatgagataaaatcttttagaggagacggtaaaagacacatatagaggatggatatagaggacgttgctggagacaactatcttcagcaacgtcctctaaatttcatctcctaaaagaatattctttgttctttacagaccactctaaaagattccgtcctttatagctttactctctccaatagcatcatctatattaaataatcaattaaaatcgatatgtcaacgtctctatattaaataatcaattaaaatcgctatgtcaacgtctcctcaacatgggccccttatttgtccagagcctacgaagagctatagaggagcctccaaatgtagaggtcgtggcaagactccgctattttacaggtccatttagcattctctgttggagccaaaaaaggtgcaagtgaaacgctatatttagggtacatgaccatttacgagttgtgaccatttacgagttgttgcttgacttctatcctaaacctagggtgttctctctcatctctattttttatactttaaactatgaattaattagagtggcagagctagagggtggttcgtttggaccaccatagccaaaaacccattaaactatatgtattaggtataaaaatattactcttaagcagtagctatgttttatttatttgatgcgtccatgacgacgataaacgcaacgcgacaacatgtgaagttgggctcctagaacaagcgtgtgcgatggcgctccaagcagatctagcatgactaccaccgtacgtgttccaggctcagtacaacatgttgcacgctcgccgtctgtgacaattcgtttaggtagaagaaggttgtgctcaccatacaggtaccataaatctaatcgaaaacacccgatcgatcaatttccatatatttatacttgcgttcgcagtacatacaactatattatattttctaagttttttatacttttttgtttttaagatgttagatgacattttatactgtttaatttttaaaatgttaattatatgacttttttatttgaccatagtatatttggtcttttttattacatgtctattgtctattgtcgtatttatattgtgaaaaaactaaactagaccatttatcattaaaatcttagctacgtcattgattaaacataatattaatatgtaagtaccattttagactatgacaagtatattgtaaaagatttaatttaaaatatattacgaatatgtgtattatgtgtagg

SEQ ID NO: 167 - DNA, 4601 bp, Zea mays
ttgtatggaagctcagcttgtatgaccctgtatgcatggcgtgtggcatcagaaacatatataatgctatgtatggatgctatttcagatggctcatatgtaacctgtatgcatggcgctgtatggatgctatttcagatggctcatttgaagttatgtgcttctagttctttatctgtacatctatgtgaacatgtactccattttccatcattgattcacaaatttctgaacctagatgcgttgaagttggagtttggaccttcaaatgaagagaagtaggggggttttgcattttgtaatctaacctggcagtccacgtcagcctggccgagggaggcgggggaggtttggacctaaatgtgagcctaagacaagtttatgtatgcgcctatgtattttacgagttccgggacctggatgagaactcgtgacgagttcgatgaccgccactgaaatttactctttgcaaaattctcctggccggctggccctccctcttttattcgttcttcaacaataacaatcggtgagtggcaggcagggcgattgattctctcaacaccaagcagcaccgttgccttggatagccagccagaggcccgcaagatccgcgtcccccacccgaccacccccacacccgagcagcgcgggcggccatggcgttctgggagggctggtgcggcggcaagggcgacggctgctgtgacgactgcagctggacgcagctcgccatctgggccgccgccatcgtcgtcgtgggaggcctcatcaccgtcctggtgctcgccttcggcgtggtgttcccgcccaaggccacggccgacgacgccgtgctgcagcggttcgcgctggcgcccgccgacccggcgtccaactccaccatctccttcaacgtcaccgccacggtgtcgctccggaaccccaacatgtaccgggccatcgagtacggcgcgctcgccgtgaccttctctttcaacggcacccgcttcgacgactccgcgtccgtgccggggttcaagcacaaggcgcggaagacggcgacgctgagcgtgagagtcggcggcgtgggcaagcccatcaagctgaccaggcccggggtgggcgagttccgggcggagaacgacacgggcagcttcggcgtggagatgcggctggacacggtgctccagtacaagggccggtccgccaagtgcccgctcgtcgtcgtctgcccgctccagctgcagctcgtcgaccccgacgtcgccgccaccgcgttccagcggaccaagtgcaccatcctccgggccaagaagtccgggtgctagctgattcagctccggctccattggtggcctggctagctccgttgggtggcttttgtttctttctttctttccttcctgtgtaattaactgattgtttctcaagacaggagatactgattgtttctccaagacaggagatttgttcctcttcttgcttctctttttccaagagattgatagctgttgtagtgttgtgtacttgtgtgtgctttgaagagtatttgtaggagtggagaagttcaattggatgtgcagaaatttctggaaatttgcaacgatggatacgctgtcagttgtctgtgatcctcttcctaagcgattgtggttgtgatctggccaatacttgttgagctccagtccagctgggtgctgttgcgttggaaggaaccttgggaagcaggaggcattgacttggcgaccggatgagcagacttcgtgcmgwcaastgawctgaaccryatckctgagygcgtttggatgaagatactagagaggttaaaawmgaatkagayctaagaaggatgaaagtggatatctgaatggttaaaataaatttaatattttaaaatgtgtatgtattaaatttggtaatgaatttttcttatgttataagtacattattacaaactatgaacagaattttgcataaattattttgtgtcatttgctccctacaaccaaaaaggtaaaagaaaaatattggtatctatatctgattytgtatatatctattatttgaraagatatatgataaaattgaggtttttatttatctttacatgcgcagtgctaaaaataagaatacaaatttgtattacagattttatattctaatgttcacaatcaaaaaattggtgtccgaataagtatccatttccatccctaattagatccaataacaaatctatctagtattgaaaatgagttgcaatctattgtttggatgtaacagagggagggtcggtccaccttctactcatgacctacaacccctaggtctgtggctcactcatgacctatcgagcctaggcctgagtgcactggtcgcctacaggacccgcaacatgacaagttgtgtcgaaacccaggctatgcaagccaagggtcgacatggcaaaaaagtggcaatgatggtgtcagagctccttgccgcccacaccgctcgtcataaagagcgtgacaaggacagcccagacgaccgagacacatacggaaaacacaactttaccaaggtagaacgtctcattttaccacggcacagtagctccttccttgagaagctactggtagccgaccctcaccttagcctataaaaagggaggaggtcagccagaacacagatacgaacacaggcatacaaacacgtcgaccacaagacgataagatcccgaaggaccacgcaaccggagtcaaggagcgaaccaccatgacgcccaaggctgagtagagagcaccagtcctatagtctttaggtctagccacacataagagacttgggagctcctctctctcgctcacccgcttgtaacccctattacgagcattgagcaacaaggtgtcgatagcgcgagccaacaaagactggatgtagggacgttctgtcytaraccagtataaatcttacgcccactgagcacaccatccggactgcaacatgtcgatgtctgccacaaagaactgcatgtaattgatgtagaagtggtcttaagtgccacatgcgatgagcaaggtgatgtgccccaaaggaaatgtgaacatccctaagataatgccatagaagggcactgaacttggcttaagagtcaacttgggaagtcccatccttttgaaagtcttggcgaagaggatgttcaacaactactgccatcaataaggccttaacacaacctcacaacacctatcattggaccaaagatgagtgagtagcaccttaggcatggtcatggtctaggtgatcagactagtcaaaattgatcgacacttcagatcattagaggaattctagggtcgtcggttccacgatgaacacctctctctctctatgtaagcttctgcttccccttagactcataagtgtttggctcaggcttgggttcaagtgccttgaggaccttctcggtggatccctgaagtgaaagcaatccttggtcttatggtgggtatttggatgataaatgcaatgtccctccataatcttctaaaactcatcttggttatgggagaaagatcatcgctgaccctcctgcttaactatcgtcgtgaattgatgatccatcttactccttttaggtccaaattatgaggcattttggacaaagtttgagacaaacttgtaaaactttgattataaataactattttgttatttagttttgaaactaaaaaatactttcacaaaagtataaatgtattaagagttcatttgtaatttacaaaaaatattggtcaaatctatattttggagaacgtatcgttatcttaaacgacttataatttagacctcgagagagtatgtttcttgtgtctgcctttatctagctcagttttctaatctttattctctttgtcccttcgagacgaggacatgtgtcaaaggatttccttgctcatggcgtacttgttgacaatttggaatagaggggcaaggatggtcaaagccttacgcacaagcttctgagatagttcatgcttcttgaggcctttgcagaaaacataaatggttcgtcattaggcatattggagatgtcatactttatgtcatgtcacctcttaatgtaactttgtagtgaatcctcctccttttgaatgacttgctcgaggttatactgagttctctcttggttgcaggtcatgctaaagttgctaatgaaatagcgagttaattctctccataagtcgatggagtttgctaggagaccaaacaaccacttcctcactaggttaccaaggcacatgggcaattagttggccatgatagaagactctcctcctatagcgatgatagacaattggtaaactctgagccaatcagttggttttatgcggccaccatagaacttgaccgatgtcagcttgaagtttttttggccagttgacctgctcaagtggctcgtgaatgccttaacaatggttgccctgaggcctttaggagtcacctcccacttgactcggtcattattcgagccttcacactcacaatcatgtctcttagcttcacgatgctcccattcctagtcttggtgcctaacattaatgcgattgcaaaggccttgttgtcgaaaatgtttatct

SEQ ID NO: 168 - DNA, 3149 bp, Zea mays
  misc_feature (2972)..(2972): n is a, c, g, or t
  misc_feature (3072)..(3072): n is a, c, g, or t
tttgtgccagactcagaggagagaatgtctaaatgccatacttttctatgtgtggatacctgcacacaaatattctcactttttacatctagtagtgcacataaattcccatacttcaaaaacaatgagattatctagcaatgtcatgcaaccacctgaatataataaaatgacattcagaaagggattttgcaacctcaccttcaaggaaacttacacctttatacatacgcttatagttctgcattgattttggcagaatatcaagagaaaaaacagcagcgacaaagatcagataagtcttccactaacaagcatttattatagacaaactgagaagctggtaaaaatgtgattatggaagttgttttcaaacaatagtatagtttgttaaatcggagtaaaatgctaactcagcaacttgatgcaaagacatgaaccattataagtatgtaacagtaatgacctgcaatttctggatgaatatcttattttagcttacctatgagatcaatgggaagtccttgggcacctctctgcgacattgcccttacaacaaccttcttgcaatttgaagtaaccagtggtcctgctgatgtggctttagaagaaatggcacgattagttctggaacagattgcccttccaaatgtagatagtgctaatgtcgacccaagcatttgcccgcaggctgggatgcaagggcgcgttgccatcatctacatatcgrtcgtcgcatatgctctcatcctcctttatgtacaaaaaggagtagggctgcaaaaaatgttttggaaacaatatcatggactacacttaaggacatataatgatgtgtattgttttaaggtcaggatgtgtatttattgattgaaaagttttcactgctacagtcaagttcaggtaaacaccatgaatccaaaactaacccagggttattcacaatctcaatgagacaatgacaacttcaacctagggaatacatattacagcaagccagacctatgtgctattttaattactgcagttgtttccttaaatgaaaggtcaacattttcaatagctttgaataatgcaataaaaacaatgccccccgcgaagttactgtcacctaggagaaatagtacaattattagaaggacctaaaaacatggcttgtaaagttaattctaatatacatattcgtataatataacctaacctttattaccaatatttatccaactgtaaaggtaattttcaaaacatggatagaacaaataaaagcctcgaaacttatgctaatgttgtccttagatgggtcactgggtcagtacttttagcagtatgttttgtatggtgcagtgagatgagaaagctccaactaaagtcgcttgactcaatatccatcatggaagccattccaatcctctcccaaaggattcctcctcgcacttggtcacaagggtcaaggtcaatgaacatgtgttgcaggttcttgaatgttctaagtacaaataaacatgtgttgcaggttctgttggcaataattaggtggtgaatatcttgtttacctggaattctaagtgaagcatgcttctaccttaacaactaagatctcaatctatcttaatctgtccaacccaaccctaaaaaaaaggaatcacatttcagaaaggattgacgagttacaaagcacaatgcaggtccataacctttggttatttccaaaacaaagtcttgcatatatggctagaacagtaatatggaacaacaaaaaagtaagggtgtgaacagagcatggtgccaaagaaatgaggcaatgttgtaatatcaaacagaacaaaaaatatacttaaatgaacaaatatggtacgtgaaaatttagttaagaataatcatataattatatgtagaattattacggttactcaggatgacttcgaaagtatggggatttccaacatgttcgattgtgttgttggtcgctggcccataataactccatcgaaagcttactaaagaattcttatgcatacacatgaaactcaagaatcgtgttatgaccaaaaggttcaggcctgacaactgaaggttcaaaagcaagggcacaaaaattgtgaaaagacaacatgatccttccacatcctaagataagcaaaaaaacatctctacttgggtaattgatttttcagtcggctaaaagtaatagttttattttgccaacaagatcagctatatgcttgtagagtggaacctgcacagcaacaagtgtccaatgatctgagaataagaattatgtgcggtggcatgacatatttatcaaatcatgatgattttagaagaaaagcaacaactcttttttagaagcaccagctttgcaagctatagtttacacagccagcatagcatttccaccaagctcagcctgcatttcgcacaatatcatatctatttcatttggataaaatctatttgcccgaaataaaggaacaaaaccaagatagaaaaaagtttaggcagtaccggtaagtggaaacacaaattcagtgaaaagaacataattatttccacatagtcaaataaaactgaaataatcagtatcccattgcccctatattgactatacccattgtaaataattgcttgagcgtattgagtcatcaattgtttgtgtacaacatgggtttgacaggaacaaaaagctacaggggagagaaaaaggaaaatgatctctgagtgttccaccttgtggcgtgccttttccaagtccacgatggactggtcgatctatgcatgttgctatgaatccatcccaccgagcacctttgacaccttgtcattgctcacctgcaccgcgtcaatgaataccctgcaaggatcttcagcctctcagagccccctaccgcatcggtggtaggataagggcatggtggggccaaggaggatgaggaggtggtgcgctaagggcatggcggggtcggggtcgcacnccctgtgggtgccgatgtaggcgtgtcgtggcgggatgcagcgaggtgaagcacgcgagggtgtgggcagaactgtcggggagctcatcgccgcaccagntcctgcgcgcggtgtgcgcacaccacaacctcgctatcccacccatccatcagctaaggtgggacgcgacgaggggg

SEQ ID NO: 169 - DNA, 4501 bp, Zea mays
  misc_feature (3724)..(3725): n is a, c, g, or t
ggacgagaggcggaacgagctccccgagtcaacggcggcgccgttgcccgcggaccagacgggcacgccgccggcgtaggtgatggcggcgacgaagagcgacggggaggacgcggacgccgtgaagccgagcgagaaggtgctgttgggcgacgtccacgtcgccgagttgcccggcgagagggtcgaccccagcggcatgtccgcgccgcgggacagcagcgggaggaggaagaggcagcagccgagggccgcaaggcccccggagcttcgccgcaaagggcgcatctttttgccttcccggcggttcgggggcggccgcctcctctggtcccttcaaccctttatttttctccgatggcgatgggcgatggccgatggcagacgcagaggcagctggctagcagatcaaacctaagctccccgctctcacatgtggcatggcgtcttctcttgtcctctgcgattggtaaggttatttcgcaatggagcgcgtggatctggtattggcacgaggaggaaggactaggtgggagcggggggaattggattggaccgcccgggctggtagtggtagtggtagaacagaacagcggaggagagcgagacctggaccgggagaggcagaagcagaagcaagttgtactagactagaagtgaggctcctctcctccccatagatggatgatgcatggagcttgggaaaaaagtccaagcgtagaaacaacggaggaacggcactattgtcgggtcaaaatgtgaaatcaaaccgctcgttgtcgacagcgttggcaggccatgctttctcaatttttactactcgggatggctcattttatggttgacttgactgcggcagcttccaacgagctcaggctcaggaggaagaggaagaactttccagttttcatcttctgacgaaaattcctcaggacaggagacgataatgctctctgttccggaccaggtatgtcatgccgcgtggtacggtccaaaccggaaatacgtgcacatgtgaagttggtgtatatattatacatatgttaattaaatcaccattggccatcttaatttaatgtctccagatacattttgcaatgaacacattccaccgttcactactttggctgtgtttggagagtgttcctgtaaaacatacacagagcaattatagacattaggtctgagataaatacgatttaatataagatgtgcacttctcgtagcggcacggcgatggtagtagtgctgtaggcgtatcatgaatggagcgagcaatcgccgccgtccaaggcaggcatcaacggtcctgatgatgggaatggggtggatggtgccttggtgtgggtgggcttgacttgaccgggttctagggcaggctggatgggtgcgtgtgtggtgggtgggtgggtgagtctacgggtcaacatggacggcttaaaatagattgattgattgatagacgctcatcctcatctgatgccttgcttggttttttttcttttcttttctttttcctgctcacattattagagctcagcacttcctttttgtattcgctgcattgcacgccgctattgtttttctgcttgcaggttgacttggagcagcagttgggttcacatgtcgatacccctgacgttaattaattaattgttagaataatcacgagatccatgacgggttgatgggcttgcgtgcatttggatggacgttggaaaacaacatcagttttatagttattctttcactttattttgtaaatatttgggtgtttttacaaccacggagtttaacattcgcttcttggaagttgctccccacgcacattagtctagataatcgaaaaaaaaattacctagtttttactccgtactataggctacagccgctcatgcattacaattcaggggaacaaaaacttgtcatcactctctctctctctctcacacacacacacaccattgaaccaaaacacacagaaatctaactacacatctataaatagatccccatccatgctgctggcaatctacatcaccaacacctcacgtccatgttgtgtcatacatttttttatttgctcttgatcgtctctttttcattgaagttgagcccaaaaacatagccaatatgtagcgcagaataccacttgcataaaaatttacattgaagcattatctaagaccataccatctctactcaaccaaattgcccagcatacacaactgaaaccgctaaaaaatcaaccctctcattttttttcaaccaaatcactgagccaagaactaatttgaaccaaactttgcataataacaattcaattacaaagaaagaagagatgtccaatagtttttttactaaaaaaagaacaatttacattattcttccaattacacattacaaggccatccttagtaaacgtaactccaagacaaaagtaccacatgaagatcttgatcttcatctgcattttaatcttccatatgttcttattcatgactacaatgctactatccaacaagttattgtacataggactgggcattcggttaatcgaagtttttcgatttgatttttggtttttttgaagttcagtttttttataatgccaaccgaaattatgtatagaaaaaaagactggacatcggcttaaccacaccgttcgattcggttttcgatttagcgaaaaaaccgagctttaaaaacaagtaaacttccatgcaataaacgaacaaatattgcaacatatgcaactaccactcgaagtctcaaccactcgctccacaagacctcacttgcagtgaactgggcagtagggataaaaacggacgaacacggacgaaaaaactcctctcctgttttcgtatctgtatttcatcatcgaaaatgggatcaagaccggaatagtcgggaatagaaacgggagagggatagatggaattgcgaaaacaaacgaaaacggaaatactaacaaaaactcataatttaatacaaacagaaatgatattgatgtttgactagcgattgaatagcatgacaataaaataaaacaaatagatacagagaggcaacattcttttattgtttggttactaatggtgtacatttagctacatctgacgttgtttaagactttagaccacttgtcattgaaaagagccgatggttataatgtcaacttgtgctataatttgtcacctaaagacacgggtctttagtttatatactaatacatattagacctgtcccatatttatcaaatacaaaataaatacaggttcaatccggataaaaacggaatcccacaaaaatggacgaaataaaccctatctcgtttccgtcctgtttccatatttttccgaaaatacgaaaataatcatgtcaaatgtagaaagtggtacgagtagggggacgggattttatccgtccgtttttaacaggcaacgtgctggcttttgatgtttcaactaggcggtagccgaccaactcatcaagtcaacaactgggcctaagcgggaccacaggagctggaacccgtgtggaggtgagctcgtgactgtgattcagcttcaccgcatgaactctgggtagtggggtggtatgattagggctcaaaacgagacgagctaagcttggctcaaccatttcacgagttgaggagacaagctcgaggctcaatcatttcatagagcagaggctcaatcatttcatagagcagagnncaatcatttcatagagcagagacacaacttctgttctagtagataaattacaacgtcaatagaaaaatgttaataagtaccttgccctgcctctaaaatcagcgacgaaaactaaatcgagagaccaacagtccataatatgtgtatcaaataaccagcttgagtccgaaagatagagaaaataaggttaccagaatatccaactaactctaataacaaagattgtacagaaattaccttcaaatgattaacaaccattttgagattatttttatatcatgaaactggaacatgttatcactcgccggttcttcctaccatggctgcatcatttgctctaaagaaaatagtggttgcaagagaggatgttaaaccatcctacaaggcatatgacgatttgtcgcatatcaatatgtatgacgacacactaactttacaccaatatatgcacaagtaccacgttgctgctaggctggatggaactatcttaccaacgaaaagatgtgatgtactaagaaaagagcccatcttgtgttgtatccaccatagcctccaacaactacatcaacttgacacagaaaaaaacggatattatgtacatcagtaaggaaaactaagaaagaaaatgacaaaaatccacctaaacattaggggtgaggtttccgttagaatcacgtttagggtttagggttcttctcacgtaattactctctcacctctctgtaatgggtcaggcctagttaactcaagcctattaatacaacactcatccctaa

SEQ ID NO: 170 - DNA, 3001 bp, Zea mays
atcctctccttacgcctataaaaggaaggaccagggccctcttagagagggttggccgcgcggggacgaggacgagacaggcgctctcttggggccgctcgcttccctctcccgcgtggacgcttgtaacctcctactgcaagcgcacccgacctgggcgcgggacgaacacgaaggccgcgggattcccacctctctcacgccggtctccggccgcctcgctccttccccccttcgcgctcgccctcgcgctcgacccatctgggctggggcacgcggcgacactcactcgtcggcccgagggacccccccggtctcgaagcgccgacaatacatgtcttaagtttttttaaattcactcctttagacacactttaagatacagcttaagatatccattgtacatgccctaaggggtgtttggtttctagtgactaatatttagtccctacattttattccatttaagttgcaaaattaccaaatatagaaactaaaactctattttagtttatatatttggcaatttatacactaaaatgaagtaaaatgataggactaaatattagtctctagaaaccaaacacccactaaagtgtaacaaaaaaaaacatgagttcagagctacaaggcacaagtacacgtgttagtcttaaaaaaaatatggaatctcggatcctttccggctaccctgacactaccaagattcatgaaaagtttttgccgaaattttgaaccctactactgtcacgtcagttaggacatgcataaaaccaacagccatatctagctaaccgttttgacaagtaccgaaacgtgcttgcgtgcgcgcttctttactagacagagaggctaccagcctaccacagccactttcatttcgagaccccgtaccgccatcactcgacgcgatgtgttttaaatttgcgtaaaatcttgttttatccacacaaaaaaaaaatcataccatggcgcacatgtgtgggtccgcgtctgaatttaatgtgctgccacgtacgataagacaggggttgttcttcgccaagtgcatctgaggaaggaactaatcaatatatatatagtctcgaaagccctcttgatgacagtataaattgagtgattagccaagactaggcaaacggttcacgtaaaggcctgatggagctttattacactgtgcctatatgtgtgtgtgtatgttttttttttttttgccataagctgcacgttaggtatttgggaaattggtaaggttgctcaattatggcgtactacaagctttagccctaattacgttattgtccacacgctgacgcacacgtatatgcatatatatggcactcgacgactatagttttttttttaatctttccttccagccttcaccacatgtcttgaacagaacaataccacgattcaattgcttcgtgttcctctaaccaaggcagtcccttcgaacagattgcaagcctctccacaagacctcttaccaaggaccaaatggaggcaatcatgtggccggtgaatcaaggaaaagagaagacaatgtcaaagaagagggggtgcgaggtgcctcctctggttcccccagccacacctagactgcggtgggaaattgagcatgctgccctgttggttgtccgatgtttaggacttttccattgttcctatcacacgtggattaaatgagattggaaaaaattataagagattttgacttgttcgagatttaaaaccactcaatcccacttaatccacatggtttgagagaacaaaacaaacaagcccttaatgttacaccagatggattgttcttgttcctgtcacagtggggttatctagttatgtcattgaccgtagtgctcggtgttctggtgtctagtcggtggcttttgtatccctgccatcgagtgcctagctttgtgtttgcctgctttcagcttgttagtctggggtttgccaagtgacagtaagacacaatcctttcgtggtgggagactttgggtgccttgttacatcagatattcgtttcgatgttttccttgtgcctttctgttttcccaagtagacgtggtagttaaatgtgtttcaattgcactgtttttttttcatggaacatgaggggtttaaatgaccgtgctagtgaaggatgagatgaacaatcctctctacaggacaagagcgtccctgggtctatgcgggctgtgcgaccacacaagtaccccaaaattgcagggccctaattttagtagaggttcatatatattaaatgaaaaaagtattatattccatgtattctaggccaaattatttgcggtaactaaaaagattgtgtcacgctgcatcacgactctagaatctaagtggtgtccattgctcttccaaatcctacgcgtcttacttagacctggaccaatgtcggtcagtaatatataaatatacaagcatcggttagtagtatctacgagaacatcattggagataatgctttttaaatagagaatatgtaactggtacaatttaatacatataatttgtattataacatcattgtaatatcattggagataatgctttttaaatacagaatatgtaactagtacaatttaatacatacaattgtaacatcactggagatgatcctacaatgactaggattgacagatttcttgcgacaactaagtggcatgatctcttcccctcggcggacctacaatccgtttgcaccatgacctcggaccactgcccgcttattaagcaaggtcgttcttccttttgcttcttccgtttgcaccatgatttctcgtatgcacgtaaatgcattttaatagattcatctacatatcgctttaactgatctcctcgttgatccatgaaagtcgtaagagatagatctggagtacttacagcgggaccctgcagtggaggtaggagagattccatatcgatctctccttgacggacgatcttctggtggcgatccaccgtgaagtgtgacaag

SEQ ID NO: 171 - DNA, 6301 bp, Zea mays
tatattacttattatatagagccatcacaggtcacaataaacgtgttacatgaactaaccctagaataattccatcattcatatgaagagatcctgaaagcagaatgtctaaccccacagattagattatccacgaccaacacgactgtcaacaaaactacgtcgccctaagcctcgtcccacccccacatactgcacccagtaatctgacactgcaactcacatggtgacatacaggcttgaaaatgttagtgatgtacgaactatataagttttctactgagatcaacagcataaggctctagtggtcaaaacgagtttggattgagaatcgcctcgatcccgcatggattggtccggatcgtcgaggaatggatcggtgagtggtgtttggatagcgagatgcactaagcatagcgagtactcaggacgcaaaacaaaccgccgaccaaaatctacagctagccaagtgcgccagccaaccgccgccgccgctacgcgcataaatgaaacctttacggaactagaagaaccgaggacctatagactcctagagcggcggcgctacgcggggctaaacaataacaacaccgccgcggctcagatctagacgaaagcgagcgagagcaaagcagcggggaggaacggatgtgtggcgacactcaccatggttgcaagcactgagtgggatgccgctcctcggcgccgcctgctgctgctgctcctccttcgcctccgtgctccgccgcagccgccaagacaacgagagagaggaataaggttgggagagtatatatagttgtttggggtagggttttagtttgcgggattcaccaatttgccctttgacgggccgtttgggcctcggccctgtagtgcggtggcaacaggcctacgttctaaaatttggcccgcccttcaccggccatcgacgagttcttttttttaaataacccttctctctccttcctttgagaatacggataggatcataggagcactgtatttatttgtctctgtgaaaaataaccatcaatctataatggactgcagtctaacatagaaagttagatgtgtgatagacaatgtcacacaagtttgatgtatcatagcaaaaatattaccttacatcttatttactaatgtcacacaagtttgatgtatcgcataaaatttttcttacatttgatgaagtgatgaacacatatcaagtgtaatgttatattttgtgtaattgtatggtcaaacaatacatttatttgattgcataggatatctattgttagttgcaggtatattcgatggctcgcacacttagttgattgtgtttctggtgattttttactgattattatttcgatgatattatcatgctagtttagagccatgatatggagtaggcataggcaccgttctcgaaaaacatgatttgttcatgtaacctttggcagagctccactccatgattctctagctccgatagtcgattctctaacagagtgataccgagtgattctctaacacaaatgaatttatttgacaaaatcgtttgacaaataggctctgaagtgattcctgataagttagagagtggggaggagggtttctttatctcactctttataaaacactagttgattgaccgtgcgttgtgacggctcacaacaatactcacgtaaaatatccaccaaaaatatatcaagatttttattgattgtctccgcataatattttttttatttgactaactgatgttgttgtttactccatccaatataacaacacgaccaatgaaaggagcgattagaagagagttcacaacgattgactaaacggatagatattatagaatggcataattccaccatacagagacaaaataagagggtttgtgatctcaagattctaaaataagtcacatgaactcaaacttataaaaaagatagatcaaaatatagagtggttgctaaagttatgcatcaataaaaactgaatgcgctccatacaagttatggtacttcgtaccaattattaacctttccatttacttttagcgtgacaaatcattgctgcttcatccaattcagcaacctcaaacatcatggagtccattgcaccaatgtggtctcagaaacggcttaatgcatgcaagagccaagaacacaagggacgaacaccctatggtaatgctcgtatggatcaccgaatcctaacacatattttacaggatccatgaaccatcatcagaagaacacaaaccatgtgcagaaaataaataaagtattatcacacccaaattatgttaagtccttagcacaacaaaaaaactaacacttaaaacaacagaggaacaacataataatttctgcaatgataaaaggatgtgtgacagatacatagaagcggtacaagcataccgagtcgacaccatggtaagggaaaaagccatgtagacacgcgatgtcgagccatcgaacgagtaccatagacagcaaatcagggaccccccatctctcgcctccatcacttccaaggttttgtagagcaggaagagaacggaagagttgggcatacctgttcgttgtcgaagaaggacacgacgaaggtctgggcatctagagacgacatagctagtatgtcgctagatacatatagggagagagcacgtaaacacagaaagtagcatagccaaagcagctccagaccgagaggcacccacatcagacgtcagtccgagaaggaaaccctaacatataaagttagatatgtgatagctaatggcacacaagtttgatgtatcacattaaaattttcttacattttatgaagacatatcgtgtgtaatgatatatttttgtgtaatcgtgtggtcaaacaatacatgtgattgcatataatatctattgttagttgcaggtatattcgatggctcgcacacttacttgattgtgtttctggtgattttttactgattattctttcgatgatattatcatgctagtttagagccatgatatggagtaggcataggcactattctcgaaaaacatgatctgttcatgtaaccttggttccgcttgtttaaagctaaataaatgacataggcaagcatcctcagggcatgtacaatgtagataccacgacacggttctcaaagtagaagatataattaagacatagttaagtacaaaggagtgtgtctaaagccttgtatcttaattaatactgcatactctttgaattaaatgatggttgatccattgtgtatatgtactatatatacacatatatgttgcatacttgacaaattttgcaatataaaatatacatatatggttgatttaacgtggaccgtactgttgccatatatgttcaactaaatcatttttgagctcgatgtgctttgagcgatccctaatctctgcatttggtccaagtacatatgcaaaacacggattaacttgattgctcactttgagtgataaggcgatagatgctccaggattctcattcaaatccaaaggtatcgtagctatttccttttcatcttcaactatcatgtaggatattactcaaatgaaaaggcagagaacctgtaggattgcttaaaagatatagtagtattttgcttagatggcaaacatgtctattcacgatacgaaattcattgttgttgcttaatcaattgcaagaacagatctacgacttaagtaattggaagaatagatatatgggatcaaagaaattagcaaagaatagattattgtgggataagaacagacctgcgggattagttgcaagcacaggcctacaggatcaaaggaacttggctgaatctaagggcttgttcgtttccgtcggattgcacccgaaattgttccagctaatcaaagtttatataaattagagaagcaatccggtcaggaatcgttccgacccaccaatccggtagaaacgaacaaggcctaagggatttttgcaggacgttacctttcaagcagatccatgaatgtgtagcttgccaaggatgatacacgtgttgggcggcgaatggacggtgggcgccgtcggtgaaggacccctgtgcgccgacgggggaggaggttcgagagggttgttgttgccaacaataaggggaggacatctagaaggaggtaagagaggggtagcggcggtcggatggagaaccggaaagggtggtggtggcggctgggtggtgaaggggagaacctgtttctttccgattcatggcaaaaacaaatcgacgggactagtgatgaaaaagtgaccgcaaaacagatgaacgggagcactcgatgccaaaaagaccaccgacgttcatacaacgcaacgacatcgtagcttcgccacgagccatgcgcgaggaacggtgcattcgtcaaggatcgagtcttcgaaaattttacacgatatattaaacagcgtagggccggaccacattttctctcaccacttttcacgtcttctctcccttggcaattttaacatatgagttaacggacaaaacacattaacctcatgactcccgccgagcacagacgcaactgcaccagcctgaatcttcagatggacgacaaaatgataaaaaaaaacttggcttcgcccgggttcgaaccggagaccttcagtgtgttagactgacgtgataaccaactacaccacgaaaccatgtttgtgtttttgttgtaccttgtactgtaatatactatatagcacttcatgctgtgtgattacataacagaaggtgatcgcagtctataaattaaagactgcaagcctatcactatcaggccgattccatgcattatttcagatgctgcgttgtaagtgtacaaatccgtgggggcgtacagattgaggagagaaaaatgtaggcaggcacacactgtaaactagctagagtgcacttcagatcattttagcagcgtatacattgggaaccctcacctgctgcttgaaaagaccagcacacagtgcacacccggatgcctgaaaagttttctagttagtttcctcgtcacgtgtaagcatgaatccatccttcattctcaacctaaaacatctctatctgactattcttggatgaagggtgttttctatcgcgactaatgaagagttcctttcagaacagaagtactgttaaaaaaaatatcggaacagttgtgtgtgtgactgtcaaaccctctgagcggtacctcatcggacccaaatagtttcggaggtgtgtcggattggtctgacgacatgtggcgatctatacaacaataatgttttacctagggttttagctatagggtcataagaccctatgaatagtcgcctcatcggaccaaggtggatgggtctaacgagtgttgtgtgcagtgaccagaaagggtccagtggacgtcagatcatacgtccaagccaatgtgttgctccccacccccacgtatgggagacctttaatctcctctaacattttaattacttcatttctttatgataataaccttttttaagtaccgtaacttgagagcaaaaatgtgtagctaacatttattcataaagaaatgaagtaataacctttatgatttatttaaacttcaaaagctattgaaaaaatgtcaataattgaatcatagtatatggagagaaactgtatagggtgaattattagagacttctagttgtgaatggagtatttttttagggtgtgttgagcccaaaaacgggcaggcggacggtcctcgcgtgcgcagaatgagagttccagatttctagcgggattaactcgggaactgacttgtaacgggtccagacctcctccctttatatagacgaaagactacagctgattgaaccctccacaatcgatccaatcaactatacttatcgtttttactttatgcattaggagtagctctagtttagcctatctacctcgaatcttaacctctctccggctctacgtcgactagaggcgtcttgggtgacttgttgacgccaagacacacccaagatctctcctccccgacggggttcctcccgggaggcgaaatctaggtatgttgccaagacgatgactttgtacaccatcgcggaccgtccgagccctaggcacgcaccatctagacgtatgcagaggaggagtcgctcctacatccaaggtgtgctacggaccgtccgcgcctccgcagggagcactatcatgtggttccttccagtgtttggtgcccagatcgtcgccaacacgttttttggtgactccactgggatcaggtgtctaggtctactaaaa

SEQ ID NO: 172 - DNA, 4151 bp, Zea mays
gaaagtaatgtacaatagaagggagcctgacaagctcccgggatgaaaatacatacgaatagggtgtaggaaaaaacattcctatcatgacctcacagaactgtttgcacccctaaagagcgataggttctccttaacgcgcctcgccacctggagcaaagaaaccgaactttgtttgaatattctctcgattccattctttccaaatgtttcacgtcatttaggtagtgacactgttgaaattcctcgtgcgcctttttgggaagtgggcctccgccctctcccaccaatcacccagatttgtggtgctccgcggatcggcctgctgggaccagagacatgttctcccaggtgaggacgcggttccaaacctcttgtgcaaaagcgcaagtcagacataaatgaaatccagattacataggtctgttgcacagggtgcaaaacgtttgatgaggccagccgcgtcgcacgaggttatccgctgtgaggatcttattttagatgagaatccaagcgaatactttgcatttgttttccgctgtggcgcactaaatgagatcaagcttgtggccacagtaggagccgatggactgggctctataagcagacctagaggagtagatgtcgtctggcgtccatttccaagtaatggaatcttgaacatcctgctctaggtggatttgttgtagcctaatccagagcgcggcaaattcctcaatttgcacggttgttgtgattttccttcttagcggattgatccaggcgtcgcttgttagctcctgtagtaccgacatgtttttcctcctgaccagagcaaagaggtggggcgctaggttgcaaggggcttcgccgtctagccagctatcctaccagaacttagctttggcaccgttaccgacggctatggaggtggaaacttggaaaagcaagcgatcaagtttgttgcatggaacctacaggtcttgccaaggttttgaktgrgccstctagatgcatgctcgagcggccgccagtgtgatggatatctgcagaattcgcccttaagtctgcccaagtctttaggtctactcaccgttggccaattaaccaggcagtggcctccacttgcattgtctccccctttccaaaggaaggaccgacgaatcttatcgatttgcttcctggcccattttgcaagggggaagatggacatgtgataggtcggcatggaggagagcaccgaggtgactagggtgagacgtcctgcccggttgaggagttgtcctttccagcccgttagccgttgtccaatcttttccactaggggttgaatatgaattttttggagaggcctagtatgcagttgaaggccaaggtagcggcaagggaacgatttgcagctacccgggaagggttggagaatgttcgtcaagtccatgttcgcacaattaatcgggtgaaccgagctcttctcaaagttaatgaccagacccgtggcagaaccgagctcttctcaaagaatttgcttgacataatcagggctcacaaacatcgcagcatgtgttacaccattggtatgtaaatagctcagatttgcaaacataggttggaatggttagacatgtgttacaagaaataaaaaatcaatgagacattgagagcgacagatttaagactcttactcattaatgcaatcacgtgatgataaaagggatttacaagctttgagcattcagattacgacatgtgcattaaacatacacgaattctaaacaaattgaattgtaaatggcaatcttagcaggactatttctaaacaaactaaattataaacatcgttaagaagtataacatgggttacaagaaagaaaagatgcataaacttgtcctggttagaggataaaaagcaagaacaatacaccgaaacctgtaaaatttacatcatacaattttcaaaccccctaccttcccaataataagatgctttggtagtcctcgaaacatacaattcacattgaacttagacaaaaaaaaatatctaatttataatggagggagtacatggctacacatggataatgtgataacggaaattgtatctgatggctgttgagcatgtttattacagctgaatttttgaactacagtcaacaatggcagttaggtagactgaacaagttcctaagtaaatctagcatgggaccaaataagtagatgatacaaattgattgtaacatactaataacaagcagtggtcaaagtggacctaaacaatcaattccctgtatattagagaagcttacttttatttggtatctgcactgctatcattgccatcatggtgcaaatacattatgtgcagtaccaatacaaatagacataaaataatttaaattgtgttaattaaaattcatagcttgcattgccattgccgtgatttaggctcttatatgttgaatacaaggtcctctttttcagtcacaggatattttgtctgtagtttcaatgatctattgttcctttagttgtaatatgcaggttaggcttaatgcaaaaaactcttgctgctgatgcttcacatgtttcctctgcaatatattatgttggtgtaaatacattatgtgcagtaccaatacaaatagacataatataactaaaattcatagcttgcattgtcattgttgtgatttaggctcttctgttgatggctttcagataattgggcaacggtgtgtgtatatgttcagattcagaaagtgaggacaatatagcgtttgcagcagtggtaagttcattcttaatacccacaagcgaatacccatttgtagcagtgttaaccatttagctcgaccgaaaagcaatcaacaaggcttgcttgcgaattggcacattgtaattaacattttgcatcattccttcgtcaaaaaagaatgtgagccgtagtggttcgatccctaaggcggcacatttttttgcttttcctmcaggtcgtcgccctgtgcagggagggcctgctgatcagagatcaagagggaaagcagaagacacgttgtgccgggaggaaacacacgacgaagtagagacttagaagcaataagctaaatattttgacaactttaattcgagcaggtgtctcaaacaactggttaattcgttttgtgaccaaaagaggaaaaagggccatctaatagttctgtaaaacaagcacttgcttaatctccccctcaactcgccaacatgtgtgtgccttctgcgcttgctatttgcttgggtgcccctcctatgtggttgcacctgcaccctcctgtccatctcctcctcctgctcgtttttttttttttgagtttttggaagctaccctcctatctctttccttaaaaccgcaacacctttccctccgcgcccgcacttcacggctgccaagaagtcttcaacgcccgacgcgtggccgcacagggcgaggtctcgctcgatggccaggcttggccttcgtgccaccacccacccacgcttcctcaccaccgtggagatggatgtgtcgctgctgtggtggccctagcttctgcgtgggcccacgtgtagatgccgctggagaagatttaaagggcgaattccagcacactggcggccgttactagtggatccgagctcggtaccaagcttgatgcatagcttgagtattctatagtgtcacctaaatagcttggcgtaatcatggtcatagctgtttcctgtgtgaaattgttatccgctcacaattccacacaacatacgagccggaagcataaagtgtaaagcctggggtgcctaatgagtgagctaactcacattaattgcgttgcgctcactgcccgctttccagtcgggaaacctgtcgtgccagctgcattaatgaatcggccaacgcgcggggagaggcggtttgcgtattgggcgctcttccgcttcctcgctcactgactcgctgcgctcggtcgttcggctgcggcgagcggtatcagctcactcaaaggcggtaatacggttatccacagaatcaggggataacgcaggaaagaacatgtgagcaaaaggccagcaaaaggccaggaaccgtaaaaaggccgcgttgctggcgtttttccataggctccgcccccctgacgagcatcacaaaaatcgacgctcagtca

SEQ ID NO: 173 - DNA, 19 bp, Glycine max
tctccaacacaaggttttg

SEQ ID NO: 174 - DNA, 19 bp, Glycine max
tatgcagtatgcagcagat

SEQ ID NO: 175 - DNA, 19 bp, Glycine max
tattcgatccaacatgaat

SEQ ID NO: 176 - DNA, 19 bp, Glycine max
tttcaccataacttttaag

SEQ ID NO: 177 - DNA, 19 bp, Glycine max
tctgcagaagatgtgcact

SEQ ID NO: 178 - DNA, 19 bp, Glycine max
tggaccatattcatgttat

SEQ ID NO: 179 - DNA, 19 bp, Glycine max
tttggtatccttcaactta

SEQ ID NO: 180 - DNA, 19 bp, Glycine max
tttatcatcagactttggt

SEQ ID NO: 181 - DNA, 19 bp, Glycine max
tttgtgtgtctgccaccat

SEQ ID NO: 182 - DNA, 19 bp, Glycine max
ttagatgcagttcatacag

SEQ ID NO: 183 - DNA, 19 bp, Glycine max
tcattcatctttcgaccag

SEQ ID NO: 184 - DNA, 19 bp, Glycine max
tgcaatcactccttcaaca

SEQ ID NO: 185 - DNA, 25 bp, Glycine max
tgggatgtcactccattctgagtag

SEQ ID NO: 186 - DNA, 25 bp, Glycine max
ttttcactaagaaacaccactacat

SEQ ID NO: 187 - DNA, 19 bp, Glycine max
tttctcagtttttccataa

SEQ ID NO: 188 - DNA, 19 bp, Glycine max
tgcacaatcataacctcac

SEQ ID NO: 189 - DNA, 25 bp, Glycine max
tgtgtccctgaccttgggatccaag

SEQ ID NO: 190 - DNA, 25 bp, Glycine max
tctgctcatggccaatttatcatat

SEQ ID NO: 191 - DNA, 19 bp, Glycine max
tatggtaatcaaacacacc

SEQ ID NO: 192 - DNA, 19 bp, Glycine max
tataaattaagctagctac

SEQ ID NO: 193 - DNA, 25 bp, Glycine max
tgtctctagtcattctttggtcttt

SEQ ID NO: 194 - DNA, 25 bp, Glycine max
tttggtagactcacaacactaacat

SEQ ID NO: 195 - DNA, 19 bp, Glycine max
tcaatcatacatagacttc

SEQ ID NO: 196 - DNA, 19 bp, Glycine max
tgtgattcacatactttca

SEQ ID NO: 197 - DNA, 19 bp, Glycine max
tcagacacataataacggt

SEQ ID NO: 198 - DNA, 19 bp, Glycine max
tacgggatccctaattttg

SEQ ID NO: 199 - DNA, 19 bp, Glycine max
ttttagcccacaacagaac

SEQ ID NO: 200 - DNA, 19 bp, Glycine max
tacattgatcaatcagcat

SEQ ID NO: 201 - DNA, 19 bp, Glycine max
tgaccctcactcagctgaa

SEQ ID NO: 202 - DNA, 19 bp, Glycine max
tatacctatatactgtttg

SEQ ID NO: 203 - DNA, 19 bp, Glycine max
tctaacatcatatttatat

SEQ ID NO: 204 - DNA, 19 bp, Glycine max
tttgactaccataatttaa

SEQ ID NO: 205 - DNA, 19 bp, Glycine max
tttttgccacttccttgta

SEQ ID NO: 206 - DNA, 19 bp, Glycine max
tcactattgtttcatcttt

SEQ ID NO: 207 - DNA, 19 bp, Glycine max
ttccgatccaatcgaagct

SEQ ID NO: 208 - DNA, 19 bp, Glycine max
tacatggccactcattctg

SEQ ID NO: 209 - DNA, 19 bp, Glycine max
tggtgcatgactcacatgg

SEQ ID NO: 210 - DNA, 19 bp, Glycine max
tccatgaatgcctgtctat

SEQ ID NO: 211 - DNA, 19 bp, Glycine max
tttacgcacattcatttgt

SEQ ID NO: 212 - DNA, 19 bp, Glycine max
tctaattgtagactatcat

SEQ ID NO: 213 - DNA, 25 bp, Glycine max
tctgtcacacccaaccaaatctcat

SEQ ID NO: 214 - DNA, 25 bp, Glycine max
tgacggttatgcctttcctgcatag

SEQ ID NO: 215 - DNA, 19 bp, Glycine max
tattaatttaccaccaaag

SEQ ID NO: 216 - DNA, 19 bp, Glycine max
tccgaagcaaccattttac

SEQ ID NO: 217 - DNA, 25 bp, Glycine max
tccaattacaccttccaatagggat

SEQ ID NO: 218 - DNA, 25 bp, Glycine max
ttcttaatctcatgcaatgttcttt

SEQ ID NO: 219 - DNA, 19 bp, Glycine max
tttactaaatctcattcat

SEQ ID NO: 220 - DNA, 19 bp, Glycine max
tttcagaagacccttttat

SEQ ID NO: 221 - DNA, 19 bp, Glycine max
tctcctatttggagcttgg

SEQ ID NO: 222 - DNA, 19 bp, Glycine max
ttgcccatccttcatatat

SEQ ID NO: 223 - DNA, 19 bp, Glycine max
tccaatacagataacattc

SEQ ID NO: 224 - DNA, 19 bp, Glycine max
tgtgcctcgcgttaatttg

SEQ ID NO: 225 - DNA, 19 bp, Glycine max
tgtacatcatcagcattaa

SEQ ID NO: 226 - DNA, 19 bp, Glycine max
tgctccccaagctccaaat

SEQ ID NO: 227 - DNA, 19 bp, Glycine max
tgttccaatccaagataag

SEQ ID NO: 228 - DNA, 19 bp, Glycine max
tctaaccgtcacaagttta

SEQ ID NO: 229 - DNA, 19 bp, Glycine max
tcaccagtcataaatttca

SEQ ID NO: 230 - DNA, 19 bp, Glycine max
tgttccaatgcaagtttac

SEQ ID NO: 231 - DNA, 19 bp, Glycine max
tgtgacggttagatcccat

SEQ ID NO: 232 - DNA, 19 bp, Glycine max
ttaatacactgatctcaat

SEQ ID NO: 233 - DNA, 19 bp, Glycine max
tacctcaataaatcaagag

SEQ ID NO: 234 - DNA, 19 bp, Glycine max
tatatcacctaaggtggaa

SEQ ID NO: 235 - DNA, 19 bp, Glycine max
tcaagagataagcgtctat

SEQ ID NO: 236 - DNA, 19 bp, Glycine max
tacactaaaaatcttatat

SEQ ID NO: 237 - DNA, 25 bp, Glycine max
tccaccttaggtgatataagatttt

SEQ ID NO: 238 - DNA, 25 bp, Glycine max
tctatcaaaaggtaaactatatctt

SEQ ID NO: 239 - DNA, 19 bp, Glycine max
tctcacatgtgaatattaa

SEQ ID NO: 240 - DNA, 19 bp, Glycine max
tatgcaacccattatgtct

SEQ ID NO: 241 - DNA, 19 bp, Glycine max
ttagctcggaatacaatac

SEQ ID NO: 242 - DNA, 19 bp, Glycine max
tttgtgctgctatagtcat

SEQ ID NO: 243 - DNA, 25 bp, Glycine max
tcggaatacaatacattacaagttt

SEQ ID NO: 244 - DNA, 25 bp, Glycine max
tctataatctattatttgtgctgct

SEQ ID NO: 245 - DNA, 19 bp, Glycine max
tccaagtcataatctcttt

SEQ ID NO: 246 - DNA, 19 bp, Glycine max
tatcgatcacactatattt

SEQ ID NO: 247 - DNA, 19 bp, Glycine max
ttcatcgctacgtgccccc

SEQ ID NO: 248 - DNA, 19 bp, Glycine max
tgaaaccaaggaaagctac

SEQ ID NO: 249 - DNA, 25 bp, Glycine max
ttagtgtccttcgctgctttttgag

SEQ ID NO: 250 - DNA, 25 bp, Glycine max
tataaccattactcccataaatgat

SEQ ID NO: 251 - DNA, 5519 bp, Glycine max
cggtttagtcttcctcttagtcatggacattttttagctgcaaggatagaataatatttttataaattatttatttatttatttatttttcttaccaactcactttaatttaattttttctcttctcttttattttatttcatctcaatcaaataactttaatttttaatctatttctttttttttcttcttacttatcatctttcattctttccttttttttttcttttcacaatcaaacacaccattaatgagtgtttgtaataacatcattgcattgcttccatattcactattttggacaaaaatccaaacatgtttaaaagaagcaaaatcaaaagaataaaaaaaaactcaaactacaaaacagaagaacatattttttgtttttaaaaattaattttttttctttaaacatataaaataatacattaccatccgtttttccccctatagtccaatcaaaacacaagtctatgaacgtaggctactactagcatgtgtagaagggaaagctacatagacaagtagttctgaacctgtgagtttttcttcccaaatgggaaaggaaattatacaatttctgaattttcaagggccataaagcctggcaaacatagtagagagaatcaggccaatcttctacgccctaccatgtggttaggacaacccgtaaagtctgatcataccacaggctaacagatgttggactaagaaaaaggttaccaaacactactgtctattccccacatttcttctcctctcctttcctctttattatttttttaagctcctttcctctttattattttttttaagtaaatttttttattgataaatattaatttattaattttactaaaagtaacaatttaaagaatttaaatttttgatttttttattgacaaatattacttattaaaaatattattaataaaaaattaaacttataatttttttaattattcaactcaatttatattttttttattattaaattcattcgtgtgcagtgtggcaggtactcatttccaggagacccgtcatacatgttactatacttttattatattcaatcttttgtgtatctccctaacgtgcccagttattttcaaatatatatagtgtggtgtgattgagaaagatttatgctgtttgcatagtgctgaataaaatccagtcaattcacatgaaagtggaactgtatgctctctttaacgaccactaatcatatactttattgaaagtaagagagttactttttagttgcatttaagtaatacgacactcttttgagtagacatcgtaattcatgggcatttgttgcttttattgttgtattaaaatattgtttcgttaagaaattatcttgcagccactttgtctggaaccacaagtacaagtgagaaactgtgactttgttcgttctggaaaacggtttaaagttgcaatattccacttgaataatgatttttatatatgcatggtcttagagttcacattggatctatcttaattatataaaattaatttataagaagagaattaatttatatttacatgatttattttgacttataagatcagaaattatactttatttttatcatagtatcattagatgtgacatctttaatattcgatccaacatgaattgcatagatcattttaacatcatcttaaaagttatggtgaaattaaatactttattttacctatatcattattcaataggtaagatctccaacacaaggttttgcagatattctgtaaatgaaagatctgctgcatactgcatagcattcagttgaagaaaaaattaccagtttctgcccctttgaattaatctttccattaaaggcattccatccatatctttgcttgatttgatggttctaactcgtggtttgcatatcacatcattctccgataatcaaggaatcatggaattatagagtgtgcaaaataaaaatgtactaaaaaaatatgaaatataaatatacaaacttatattgttatttaatttctagatagcaaaatctgccaatgtggtttcagacttcagtggcatggaagcatgggcaggggaaaagtgtggaaaatgcagaattgtatattagtatataataatacctgtaatttctgtctgctgcaatagtctatcattaagatattaataacactgcaatagtctagtagtatattcactaggtaattagatattgatgagattagaataagaaccactattcagctcagggaacataattggtcacagaaaggttctttggctgcaagtgacttgtgccacgtgtaattttcaagcttacagacaaatgcaaaaagattcttatgcacaaatcacaaaaccctttttgaaattttgtagtagaagtactagtactacatatttttcaccttccccaatatcattattttgctaccttggtagtcagcactaccttccagaattctgatcttggatctctcacattggaagcaaacaaatcagcggatttcctggcaggttggagatcgatctttgatgaataattgatcatgcataacaataataataataataacacaataagcaaattttaagcaagataaggaaaagaaacataataattttgaaaatagtgctaattaagtgcaaattctttctttcccttgcctaacctttaggaaccaaaagtaatttgctttcatagtgtccccttcacgtgtcaaattactctggttagtatgattatgacccttactttttttcttcaaattattatgttattaatgtaaaattgataattaatttctatccaaaaatcttattatctttaatggaattacaattttttccatatctaagatcttgattaaagattttaagttcaatctcaaactaatggcatgacacttaacttaatcaagtgtaataaggttaacctacacattctgcagaagatgtgcactgcgtgattttgtttgtttttacataacatgaatatggtccacctttttgtatgacaaatgcaaagacaatggtaatagatgcaccgtagggccatgaagccaatcaatctcagaactgtccgcaattttctcgactagtgaatatatagagacattgcatccactatatacttcattgcttacaaaatatgcatggaaagctttcctagctatatttttgtcacaatattatgatgagaacaaattaacgaaaagaagtagtcacacatgtcaaaaagaagcgaagaaaagttaaaaatccattaggggccaagtgtatttaagagctctattaagcattccaaatttcttttgacaaattaatcaagcaagaaaataaataaataaacatcaattctcatattataaatttaagttattgtgcttcaaaactatttaatcatatatcgttctcattttttgacacacgtgttatgaattatgagtttctttctttaagatatgcttttatgaagagttttgatgggaaaggaaaaacaagataaatttttcgtttttaataaatacttaaatttcttcaatcaatattaataaataaaatatttaaaattcattactgttttttaattgaaaaacttcaaacatttatatctttatactttacgttatatttttttattactagtagaatagttttccttttaaatatttataatttatttttattgcctaaaaattatttattttttatgttttacatatgtgtaaaagatcatccaatgagcaagatacttacaagttacaagctcgtgtttaactcaaaatgcatgtattgaacttttattattattattatttctttccttcgttctgtctttagactttagctcctctgttgagtctaaacaacactacatctgacctaagaatgagccccacccatgagcattgtttatgacaaaccctaataaatacattaactgattagataatacaatgttagtacatacagagaaacgtagccatcatgtaataaatttgtgtcttcattatcgaatgagagtatttttagaaatattctcattttcattaagtcacataacttctcttaaattaaataattagttttattttatttataattttcattttcttttcaaatgttacctcttaaatttattttcatgcatgcaaacgatgcgcatttaatcatcagttattgagaactcagaaattgcaaacctctctataaaaaaaaattgcaaacctatgatcaataatttaagagtttaacttttattcatattttgacggtaaaaagaaaatcctgttgttcatatttaaaatgattattacaaaaaccaacatttgtcatatatagtatgacatgataatttataaggctttttgtttacactaaagatattccccaacatttctcatgcatgtttagattaccctttggtatccttcaacttacttttagatcaactcatattataccaaagtctgatgataaaaaatattataccaaactcaagtttataatatacttttttaattcaaacttacatttacaaattttaatctaaacatatactatgtcagattttattgttgataatttataattaggtaataaataataatgtaaaagaattacaatgtgaatgcattctaattaaatttatatttcaaattttacaactaaattttctatttataattttactataaaaacgttttaaacagatgaaaattttttattgcaaaagaagacgacgatcctaacatttgtcaacaaagtcccttttaaagttcacactgagcaggtgtgagggtgagaacagggctctactgctaactatatcgaacggcggcagaatctcgcatttaaaacatacatactcatcaaatcataaattgatatagcatataattatcaatttatttatttttataaattataatgataatgatttccttaagaatcataatataaaacttaaactcttgtcaaaattttatttggtatacatgaatgcatatttctttacggtaaagttagtttttagattttaatttaaaggaacaatttgatggacaaaatataatttaactaacgaaatgtacagataaagttttatttgtactaatgcaattttatctgtacatttttaaaaaaaactagtacagataatataatttatcaagtactagtgtactattgcaaaaaaaaataaaaatttactgaactactagtgcaattttaaacaattcatagtttttaaatcagaaaatgatacaattttgaatttttgaattatatttaaaaaatgataaaattatggttttttttatcattttcagatttaacttgttcaatagaattgttaatttttttaaagaaaatgtaaaattatgtagtttcatatctgaaaaaattatgtagttaagatgatatatatatataatgaaaattaaagttataaaatttactaagcaaatatataattttttaattctaaatctaatacatacacgga

SEQ ID NO: 252 - DNA, 5600 bp, Glycine max
tggctatttaatggatattttctctggacccatgaatgttttaacttccattgtgatgatctcgtgataaaccctacattgtgggtcctcatggctagtttccttgtaagctcttagtgcattaattattctccattttgaccaaaagaaagggtgattcccttcggaagatcattaattagacaggtgttttgttaccatgctagatttaccttgtctatcaaaactttgtgaaacttttttacacttaaaaattagtactaaaaataatgtggcttttagttaatattatacaatttttgacactttttaaaaaaatgctaattaatgtctttggcatattggttaaagaattaaaaaaatgtttttattgggatgtataaatttgtgtttctgatttttttttatgttttttttctatgatttttcacaataatactttatttttttagtttcttaatcagtatcctaagcataatagcataatgttagtgagattttttgttctcatgtcagctcaaaaacaagttaatattttcatgttgagcagaaaacaaaataaataaataataaaataagatgaaattcacactcttatgaatacaactttaattcaaaacttttatataaatttacttttatttatttatttccactctatcgaggatatgtttatttacattaaaaaagagaataaaaaatgataaaaataaacactaaaatgatatataatttccacttttatatattttactttaatttaaaacttttttttttcattctatcgaacccgatggaggcaaagtttaccgtactattattaagggtacttttcccctcaaactctttcatgtttacacctatatggatacctaggaatgaagctacaatggcctatcgaaattagtcaactcaacgttctaagtaatttttagagaatttggtgttaaaatgaaataagaattttgagtaattttaatctaaaacagtttgacattttttgcagcttataagttatttaaaattaaaagataaaaataagaggttcaaatttaaagtttgtaattctatatttttttaaccttaaaatttattcttaaattatttttttgctagtgttattctcgaatcttaggattttaaataaacaggaaaaaagaagaagaaatgaaagtataaaagctcctaaagttaactttattaaaatcctctattttaatattttcttcatttttcataaaagtatttaaaaaatgatttcttaaaattatatgttgatcctccttttgtttttttaaagcgaatcttaaaataagtaatattactttattctcttatttttctatgtgctggattatggctaggtggtttgaaaaaaggcaattaaattataaaaaaagggcaattaaaaatcaaaccagtatgggataaatgaaaggattaacatgtttaattttttttaattagtatgctatattagtaggaggagattgtcatgattaattaagtggcttaaatttttaatatattaagttagaattaaagatggaataagatgactaaaattgtatcttcattcatgttatgaatgatataagttaaatttgattctgtccaaaaaaaattcatttatagatttagttgtcagaagcccaaacacgaataaggaaatgctacagtgatcatccacattgttttgttttcgacaagagttggtttattttatttattattgttattattattattattattattattcagacctatttgtaataaacacgactttgtttcttttttttattattattattcatagatgcatttggaaatgctaatgcaaactttggataaattggctccgttgctaacaattgtatacgtcactttatcgaaaagaaaacaattttatacgtcaggtactttttctcttatcataattctattgttgttaaaggaatttaatggtgattatgtcatttttgtaggcttggagtgtgcgcagagctaatgaatgagttgcagaatgtttttcttgttcttgcaattatatttagttgattttatgatgattgggatgtcactccattctgagtagtggaggggtgtatcatgtatatgtagtggtgtttcttagtgaaaaatcattcatctttcgaccagtgcaaattagtaggagccacttcatgttgaaggagtgattgcagaaagaagctactcattcatcatgttgaaaaatcctgcagtaaaataaattaagttgatgaattttatttatttaattttatcaaagtaatacacatttcaaaagtccacaagagttaaccatgcatgtgtccctgaccttgggatccaagttttgaaaagaaaagtaatacgaatatgataaattggccatgagcagacactaatttacgtgaccttgtgaactatttgaccctggtccataataggttagggaccaggctaggttggatcaattcatatgacaattataataacataaaaagagatgatcataaacagacatgacaaatttatagtcatataattaaaatctataaaatataaaaaatttaatgatgatgtaatcattgtgtaaaataattttatataattatttaattataaatcacgatttgtatgattttaaatataattttataaaaattaataaatttatcatacataataatttataattaaataataaaactagctagcattctggatcatcctttcttggaaacatttcacacattttcatcaataaaagttattttgtttatgtttgataaaattaagtgttagttcgaagatgaaaaaatcagcttgtatttagtaaaattagttattagagtaacataaaatataaaataatagaaaaataataaaacggtaatttatctaaaaaaaaaagtaacaataaaaatgaataaatatataaaaaattaaagtgaaaaaatataaaaaataaaagttaacatttaaaaaaatattatttcaaatcacatataaaaatgttaaaaattattaaaaaaagcttgttaaaataaatttttaactgataaaaaaattaaaaattaattaaaatacttagtggatagaagtaacctttcctgtactatcaacatttttttcaaccagctttagtctttatataaagtcgtatataaatgaattcttagaatggaattgtggatgtgacgtcccattattacatcacctttatttttatatttttttctcaattaaaatttcattcttttttctcagtttttccataacatgcttacgatgtctccatttatcgtgaggttatgattgtgcaaacatgttagctagctttggtacacataacaaaggtaattttttttgggattcaccaccttttttatatcacaatatcttcttgggcatagaaagagtttaccttcttaaagattcaaataatttgttctccttatatgattttggtcctccaaatgttttcttcaccctttcttgtcggtatatttctggaggtgtttgtgatagtagtaaccgtgtcaatctagttggaatttatattactaatgtgatgttttatcaggctcctttttgcttaaaaaatatccaaataaaaaaaaatcaatattttctttttttatgcattttctttcatcccaaataaataaaagataaacgtttattcaactaaaactataaaattatactttttaagttgatcttaaaattttatactaaaattctcaataaacccacatttaaaatatatgtttaaaaataaaatccttcattttaaaacaattttaatagaatcaactaggatcgatccactgacgagactttgattaatatacatagagtcaaaggagtttttaatatcagtgtgattattgtagaccaattctttttaatagaatcaagtgtacatgcatttattgaaacacacgctatgattacatttaacttttctaaaatgagcattttatttggaggataaagtaattaatttcagttgttaatgagaaaatcaattattgtgttatgtgcatatattataaatatactagaatataaatagttgaattctcagtttaaaaaaattaaaattcaatagttgagttctcatcaacaattaaaattactcatcaacatttctttttctaggaagcctaaaaaagccgctaatttaatttttacacagtagttatttttacaaataatgtaaaatatattgtcaatttgtcatatcatatagtattttcatatcatctaaattgattttaaataaaattaaagaaaataaagcataaatcaactaaccaaatccttaaaacactgcatgtcccagaaacaaaaggattaataaagcattcctttggtagtcaaggttcctcactgaagagtatagtagtagtagaactttctgctttgtgtgtctgccaccatcacaaagcctaaaacccttttctgtatgaactgcatctaaattgcaggctccaaaccctccttttggactctccattccatttttccccctaaaaagaagagacaatagtaaagcatcaaagcaaacaaaagaaagagcaggcaggctccttggaatgagcaacaaactaccttatttctcggcttatttattatttcatgtgtccccacaatttggaaattaatcatccattgctaaaatttgtcaatgcttaattatatattatgcctaggtttgattttcggctgggaagccttgagttttttaatgcttatggctaggtttgattttcggttgggaagcctcaagttctttattgatttcagttgggttcaactgtaaactaagttttgctttatttttgtcttcaaatttaatttgaaatatacaaaataaattaatttttcaaaatcaatttacagaacaaaatttacttatatttaactttacaactttaatctagttaatctgggcatgtatgattatgtttagatagatgttgaaaatgtagttttaaaaattttaatatacattctcaaatttcaaaacacaataaaataaaataaaatataatgttgctttgaaaggtaagtaaaattttgaattttttttctagagtcttttttgtcaacttcaccgttacggtgtgtttgggagcacttccattcaagagtaacgcgtgtctttttgaagcattccagtgtagcttctatgctgttttgaacttttgacataaaaaatgctttatatatgcattgatgatgagaaacacacactaattttatatgtgtggatgcagttgggagaattaaaaaaatacttttacttttaagacaaaaacattttcattttgtattctatgtcttaaaattagaattaaaaaatgtgcattaaaatttccaaaatatattttaaacttttattcaaagataggctatatctccatctttagcaacgagatcatcatcatttgcagctagaaaaagaaccaattttccctatttgttgagtctcctcttagccccacatatcacaaaaaacataatagacttaaaagtatttcaatttaaagtaataatcagtttctaaacagaattatctcaga

SEQ ID NO: 253 - DNA, 5000 bp, Glycine max
tgtggtaaaaatgatgaaaagaaaaaaaaaaagttgcgcaaagggtaacctatgatccctatccttaagatcctgttgatcaaaaggcagtccattggcggaatttgtaattatttgaaaagtaatgtcctgaataagtagtcatatgaagaactcagtttcttttccatggtaaggcatagtttgatttgaagtcattgctctcaggacaagaaactcttgcagtttcaactaattccatttattctaagtgcatcttataaatatcaaattataaagttccaattccctcttaattcatgaaattctactagagaatatcataagatgacagcaaaaagggttgcatctaaagcctccaactctgtgtacaataatcttaggaataagaaactcctcattagagaagctacccacccctccactcagtggacaaaatagatgaactgaactcctaaataactaaattgaactgtaaaaaaaagttccggcgaattgaactattatgaactagtttgaattgttctccataaccattttattttgaagcaattttttcacattttttttatctcatatattataattcagttcgattcaataaattcggtttcagagcagttcagttttttaaaacttaactatggaacagttaagtttgatttttcattcaaaacagttcagttgttttagcacagttcggttgatgaaaatgtacaatcctcgatcatattacaaataaacaaacgttcaacagcattgatagaatgtaaattgtaacacaatattaatatgattaattattttttaaaataccttttagcttgaaattattttattttgtaaggcattttgttataaaaccgataaacatcctaacatttcagtgccacaaacgcataatagcttgacatgtcagactcagaaatcaaaatctcggcatcaacaacccaatgacaaccaatacggcgtcgctttgaaattaagagaaaagctaatttaacctaatttttattagtgaaaaaattagaatccaattcaatcatcctaacacgtgggggttgtccgggcagcacgtgcccgaagaggaagaagaagaattctcgaacaaggatccgaccctaactcacattaatcacgggtcggatccaaacactaccggatccacaacccatttcgtacatgttgagaaagcatgttttattttttcctatgaagttaaggaatggttgttcttttccagcattcgaattccagttttgttgattgtgaatgaagtgaactacccatttcgtctttgaagtattatcctttctctttagtggtccttgaataaatctatgagtaattcctaaaatattgaacatttatcactttaacttagttcttaagttgatatattttagtaaaattataagttataaataagctagcttatgttcataagttaacttatttttcataatttattttaaataagttgtttgaagtagtttataaaaaataagttactaaaataatttattttgaaaaagtaatttataagctagtcaaacaagattataaacttctcaaaaaatttaccaaacatagcctagcctatatatccagtgttaatatgttagatatttttttaacatcgatttatgaattcaacacaataaaaaaagaaaatcaacaaagtattctgcatagtagcatgtttcgttataattttaatataaaaggaagtcatgacagaatataataattttaatatatatagaaaaaaatataaaaaaaatattacacaaatatatgcaacctaagccatcacccagtctaggcccaaagccgaccttgattaagtatatgtcgaaagtgaatagatcatatgtaaagataagtcttttaaatgaatctctatatgttgagatattagtctttagctttcaatcgaaaaatatcttccttaaaaaaaattgaaagatatcttggacattaaaacaatatatgagataaattgttatgtatgtttattattttattaaatttatatcaatatatattcaaatttttttgttttaaaagatattttataaactaattcttttcaagaataaaaagtaaaaagatttaaacacatataggcattatataataactgtgtttcatttaaaattaataaatataccatatttaataaatattgtaattaatatattataagtaaaattagtttaccaacaacattaaatattatattaatgtattaaaaataatacacagtcaaattataaagaatgaaaattgacaaataagttattatgtatttatatattatattatatatctcaatttttctattttaaaatatgttttatcaaagaaataattttcaaaataaataacgtgactaaatattaaaatgctaagtttattaaatatagtatatttctaaatattttaccaaaaatagtatatatttcaaatgaattagttttaatattaataaaaaaaatttaaagattatatttattaaatataatatacagtcaaattaaaaatatggtaaattttttatattcataaatataatatccttttcattaaatatataatcctttcaaaaagaattaaatataatatatttttattttaaatgtaacggttgtttacaatatataatcaaatactaatcatttgcaatatggatcatagaaacatgaagttcctctttgtaaagcttgtttctcaattgtctctagtcattctttggtcttttgccacagttattacctctcaacatgttagtgttgtgagtctaccaaacaatgaaagtgtcccagcagtgattgtgtttggggactctatagtggatacaggtaacaacaactacatcaacaccatagccaaagtcaatttcctaccatatggtaaagattttggtggaggaaatcaaccaaccgggaggttcagcaatggtttaaccccatcagacatcattggtacaaacaaaaatccttgctctctttgctcttgtataatttttttttatcaacaaatgttagttaattgttaatagtgcagattcaaacctctctgcctcccatgctcttgcaccatgttaccatatgcattataattatagtatgaacatgttcttattcaatttcttaacaaatttcctttggtttttttcagctgcaaaattgggagtcaagaagcttttgccaccttatcttgatccaaaattgcaacctcaagatctcctcacaggtgtaagctttgcatctggtggcagcggatatgatcctctaacatctaaaattgcagtaaataattgtccctaactataaccttacattcatatatcttcatttttccatagtatatcttaaagactaattataatttactttctttgtcatgtcactttagtcagtgctgtcattatcagatcaactagacaagttcagggaatacaaaaacaagataaaggaaacagttggaggaaacagaacaacaacaataatatcaaaaagcatatacatcttgtgcacaggaagtaatgacattgccaatacttactctctatcaccatttaggcgactacaatatgacattcaatcatacatagacttcatgattaaacaagccacaaacttcttgaaagtatgtgaatcacatgcccaaatatacaatttggtttagtcttttgtattagacttccatttcttagaacttatttaatatatccttgtatgatatttttacacaaaaaatattaataaaaatgaattggatgtaggaactttatggactaggagctagaaggattggagtaattggtttgccagttctagggtgtgtgccctttcaaagaacaattcaaggaggcatacacagagaatgctcagattttgaaaaccacgccgcgacgctcttcaacaacaagctctcatcccaaatagatgcccttaagaagcagtttccagagaccaaatttgtctaccttgagatttacaacccattactcaatatgattcaaaatgcaactaaatatggtaatcaaacacacctattaccattatataaattttacaagtagctagcttaatttatagttatacactttttgaatatttaacctatatgcataatttttttatgccaatgattcaacacataatataaagttgacattgcatttacagactttgataaaagaaaattagtaactaactagaaaattcaattgcatgttcttattattgtggggttgtttgtcttacaccacccataaccaacaaattagcatgaaattaaatgtccctaaagcaacaatggaataggaatctcatgtacattaattcttgactagttatccaatgcctaaagtttgattactacatttttgtttgtttgatgcattgctcattgtcatggtatttgttggtttaggttttgaagtaacagacaaaggatgttgtggcacaggagattttgaagtaggctttttgtgcaaccgtttaacgccgcacatatgttcaaacacctcaagctacatattctgggacagtttccatcctacggaagagggatataaagtgctttgttctcaggtgcttgataaaaatatcaaggacttcttctaaggctagtttcattgtaacactcctaatcagggacagggaaaaaggccccctcccccatttttttttctttctaaattttaaaaaagtaatagattattattcaattattttaacgaaatctgatttttttttattcgatatttttttctttctttaaattttaattattgtacaattaatttttatctcttaactttttaattataatataaacagtaatattttttttttaaaaaaaatcttatcccaatgttatatttttatcaaattttagttattatataaccagtttttatctcctattttttttataaaaaaaagtcttgtgttattcaattaggattttaaatgatataaacaagt

SEQ ID NO: 254 - DNA, 4200 bp, Glycine max
tgattatgtacatcacctgctcaacgtaatattttcgtgattgtcacccttaattttgtcatttgcataactcaagaatcttcctataaatttttcaccttcactactcccttctagtatttattattgtaccccatctaaacatgtcattggatttatcctaaaataattgtagtaattaaaaaaaaagagaaaccaacgtataattttaaatctattgtttaaattcaaaagtgagaatgagaagatgttatagcaagaatggttagtataggaggacataaaactagaattaatttagttattaaaagattaaaaaaattatattaattttatttttttatccaaacctcatcatttcttattatttcttttactaacttataattttgaatgtgtttttaaaaattcacaaaattctttcaaatcttataaatttataaagtcttttcaaatccttatgatataaatccagtgttataagatcggtccgatcattgacctagtagagataataagttagtgatccaattgattgactagtaattggctcgatttaatatggtatatattaaaaattcaaaattgtatatgtatctattatatataagtatataactaaaattatttgattaaaaaaaatttatccatactccaatatctaaaataacaattgataataatgagatatcaaaatgatatcgtaaaggaggtccattttttttttttgcgtgcataatccaatctgaatttgtaaaactgggctgagtcgttagatttgactgaatcatcctagaccacatgcatgaactatccaatagtgaaattgacccaataaggccatcaagtcccgatttgaccaaccgtgccggaccgaattttataacactgtataaatcctttaaaattcaaattatcataaaagtcttgtaaataaatatgataagtcataatattcctacataatcttcaaaattcaagacttttttatgttaaaatagtcttttaaaatcataatccaatacactctcctaaatgtctcaattaaaagaatgagcagattgaaatcaccaatttgaaaaaataagaagaccaaaattacattttagcgaataacttattatgataaataatttttttcttcttctaaagtatcattaaaaaataagcatttatcaaaataatagattcatttttttaccattttgggtattttggtcatgcaaaatctgactgagaagggattgtactcatgtaattggataattcttgaacaaaaacgtatcttcattgttttttctatattttaagagaaaaaaaagttatgcactcaagatgtataaaataatcgtcattcaattataaatcataatgtataataagattgttgacttttatgataatcactttaaaagtcatattaataatgatatataattaaataataatataaaattatattactttatgatgataattaaactcttattttaaatgtattctaaaagttgatcatgatttaaaacattgaaaacacttgggagacaaccgtcatcgttgtttttctttttaatatgaatcctgacgtttaaaagacaacaaataaattaatcattacaaaacatttatgagaataattaaatggaattaaaacataacacttcctatttggtttgaatttaatagattttaagaggcttttgtttcatgaatttgattatagttccgagaataatatttctgataatgttattaatgcataaaaaaatgtttggtgcatacttatgattctcgggaatgtttttaaatttaatttaattttaaaataaaatattaaataaataaatgaagttaaataagaagaaaatgagaaattattttaaatattctaatgggaatgtacaattctcaactctttacatgagaatgcaaagatagagcaaaacaattacaatatggatgctaggaaatgagttatgtacgataatattatttgattaccttttaacaaacatggaaaacatattgtccgtgaaacaaagcctaggaaaaaagttgtaacctaggaaattaatttaatcataatcacatgttactttttcaaatattaaataataattaaggaaatttaattatttatactaaccatgttttcataatcgttaagttatttattgatttcaaactgattattcataatgctattaaattaaaattttatttacaaattaatgatactcaaattttcaaatattatgagatactatgataaacatttacttacaatttttcaaagtatattatatgttaaatttaatttatttaatgaaatattaaataatttaaaattttcaaaaaaatatagacataatctaattaataagaatattatactcctaattaagtcagctgaataaaattattagatgaaaatgaaagaaatattttcactaaaatataacttgattttcactccatttatatataaaaagagagctaagtgttgatggatgggtaaccaatgtttctcaagtaataaagttaaaatgataatccgaatgccgaattcagatgaactttgttcgtaattaggtagatgaatattttattaataaaaaaagttaaagaaaatttatttgaaaaagttatgaaaaaaatagtaatttaaattgacaaaaaattaaatcaaataagaggaaaaattaaaaaagaatttaaattaatcaattaagatagaaaaaatgaaaaaatctaatattattgtagaagaaaatttaaaagatgaatgttgaaaacttagcctaagcctactagagttactcaatgttaatgattttttttctatttataattattcaaatttacacctgcatctaattttggtcccgacatgaaaggacctaattcatcagtcttttctcccaaatctctttacaaagctaaaatgctaaaatagtaaatacaaatgcatgatcaaatcataatcaataatcttaaatacaagaaaagataatgtaaatgtaatattattaaataatattaaccacaagaaaagataatacaaatataatattattaaatagataaaaggaattatattctcttagaatttttataaggaatatataatttcaaatatgaaaattaaaatatagtaaaaataatatacataataattattaaattaattttagtgtattatcatttttatactataaatttaaaatttaaataataaattattttatttttaaaaaaaataaagatgcataagtataaagcttcatttatcgtgttaatattatactatattgcgtatgtgtttcaacattcaacatgttttttgtgaggccactgattgtgcgggtgtgttgccaagaaaggggcttctttgaataaccactgatcatccttctgtgatgtccttttttctgccgcacttgttgtctactatatagttggaagttggaacaatgcatattaagatgtagttttcattttttttttttattgttgttactgcttgcgctattaaatataagagtgttttaactaatttgattttttaaataattaatttagttaaaaacattaaatttattaaccattaatattgttttcctaaaattttctttaaaaaattttcagactcatcatcttacttttttcatttaattattttttacttaattaattaataaatgttcgctagctttcttctctaatccttagtccttatcagaaatagaataagtttatcttaatgatttagaatttattgtaaagtaatcacgatattttgttaaaaaaaataattaatacaaaaaatgaaaaaaaattaataaaaaaaaacttatatctaagaagaaggtagtgttaaactactgaatgagtaaaaaaaatactatcaataaatgtattatttattcataatatattatatgtaataaatatcataaataatacatgataagtaaagtataccgtccaaaaacattaaatactatattaaattttttcggattcaaaatactactatattcaaactatatttattaaatataatagtaatcaaaatattaaatataaaaattaagaaataaattattatatgagtgatacccgactcttatctattaaaaaagttttaagtttgaaatgaaaagataattgattgagggggatctttcactcaaagat

SEQ ID NO: 255 - DNA, 6373 bp, Glycine max
aaaggaacggagtgaagtaccgaagaagggcgaactggcgtgtctttggcgaagggaagaaacgcgatcggctggttggtgagtgcgtttggaaggaaatttggagtcgagaacggtgaaggtagtggaatcatgctgcatgagttgcgttgattgaacaaatgggaaggagacattggaacactgaaaaccctaacatgtttggattggatttggattgggattggaaggggtgaggctaaggaggaagatggcagataggaagaaaaaatatggttggcaccccgcgtcttttatacactttctcaattcttcttctccttctttttttaaaaaaaataataataaacaaaatgaaaagaaaaatagttccaactagttgctaacccattatccaatcgctttccttaatcatttcaattattatgtgtcaaatggactagatcttttttcaattaaagtaaatccatctcatttattatgctggttccaactttcaattccatgtttttagctttcaataaataaaaacaaatgtgagaagtccaggtcagaaaattagtatccatatccaaaagaattaaatttgtgaaaatatatcagggttggaaaattaagggtcataattttggtgattatcaataaataaaaatatttttaaaattttaaaaattgataattattcaatcatttatttaatgaagaaaacattaaatatttttttaggtgttaaacacatttatttttcacacaaagaaagagaaaaaagattacgcgctagtagtgcagcgcatctgattcaggttaaggggcgatgagggcaggtcaggggtgagtcgaccataggtatcatcccgatgttcattgctatatcatcatttgctctgttatactcaatggacgagatactagtagatcccgtcattcctatcaaagctattggacatcaatggtatccgacttatgagtattcaaattataacattttcgatgaatcgtcactctcccttaccttctgcctgaactaatagaagttggcttgaattttatttatcaaaatggtattgttttgtaagttttttcatattgaattgaggttgaaaaatcatttttgatttgtccatgaaagcgtctattcaggaaaggatcatatgtttttgttcattttttaaatcatgacatgaattttatttccataaatatggatataaaacaaaaaaaaaaaaaatcactttttttttcttcttaccctagtgtataaagttttacacatttatttaatcataatttttatcatatatgataagtttgttaatttttaaaataattattttaaagtaatttaaacaataatatgagattctcgttgcataagcatttaactttaaaaaaatacatttagcatttaataaaatgtggggagaattaataagaagatattgggtacaaaattagtcttatttataatagggctggtttggagatattttcattttttaaataataaaacgaaatatgatagattcgcttcaaagatttttcgagtttaatatcaacttaaattaagaagccagttcttgattaattgaataaactgacagctactgatctgttttaaggtacgtactactataagaatttaattttgatcaattatcagtataaaattacaatttttccagtctagcactgaattattggttaaagattttatttactattcagtaaccaaccgttgttgaaagtgagatatgtgtgactgaaactaaaaaaactagagttatgctggcattggttaatgatatggaaacggatgcaacagggtgctgagtgcagaaaactcttgaaagttgcggaaaatgggggaatctgttgttgctgttggaagaaaacgagggttgtgaagggacaggagttaatttcatgcttccaaggtgacaatacgtcgtgcttatgcaaggtatttgctattgctatacataataaaatgataaatcaattaccttatcatgtgaaccaaggaataatgatcgatgctcatggtaatttagtctacacgacataaaaaaaaaaccctcatgtcacgctttttattattatttgtacacaaagtttgcatgaataaagttaatttcacgttgacattgtaaagtcatcattctattctatatatatgtgatataaaagaatgtttcaaatctgccacttcaagcggaaccccggtcttcaaaactacaagcttatcacctaaagtcaaagttagcaatgaaatgaagtcaaaaaaattggtgttataaacaacagcctgcatgcgatacttcctgtatatcatgaaggaactcatacattaaccattcttgaacagactctttcaaaatttcgtcactgcgaatctaagaaaaattatatttttattcttctgatattctgattgtgtaattttagatttttaattctaattgcgctaattaggatcttcaagttttgtcccattcataatcgggtccttttaaagaatgcttgatggaaggttgaggcactccaagattgttcctcaaaacctttgtttggagtcaaaaccaactcaaaaatccatttcagaaacaaaaattgtaactaaacaaagtgaagaccagtccattagtcagtcgcttagcatcaagtccaagaggcaccaagacaatgttgtaattttaatatttatttaaaaagaatctttttaaaagatttaattaaatatacaataaaagttatgatatttaaatttcaaaatttgaaattcaaatcttttacaattaagcaatcaattatatttcctattaatgtcaataaaagtgaaaattaagagagagacaatcacaattatagacttataattggtgataaaaaagattggctaactgtatttgaaagtgattttaaaaggtgatgaaacaattgttttgtcttttctctttgtttctattaatctctttctttctttactcttggtttttctttgctagttccccgttaaggtgttcttgttgcatcataggaggtgtgggttaagacgttcttgttgcatcttgggaggtgtgaaatactgtagataaaccttattaatcagtgaccgtcatgcctcagagaattcaatcacgtactccacttaatttttttacttcagcaacaacatacaatagtatccaagtcattaatgtacatcatcagcattaattaatcaaatcaaggttttctcctatttggagcttggggagcatatattcctgttaattatatatgaaggatgggcaagaacagtttcacatttgctatagaacaacaatccaatacagataacattctctctaataataattaataaagatcaaattaacgcgaggcacataatccataaaatgtctaaacctcaaatatatttgttattgcttattcaatgatttttcattagtttcaattttggtagtatcagccatatggtaaggtaaacttgaacaacataattatataccagaagagcttaattaaatgctaacacaattcaatgaaatttgatttgatagaaatatactacagtaattagtcccctgcacatgctttagcatgccacagaagatgcttgcaaacaacattaaagctggacattttacaagcactgaaaaagagatttcgtgagatcaatctcacttcttgccagcctctattctggattcccactttgctctcttgaaattgataagcacatgggtagcgaagacaaaagatgctttcacatgatcaagccccatatccttttagccaacttgacattttccacaaaatttgaatgtttcttaaatgggaacccggagatggaagtttgaggcacaccagagtctcccaaaacattaatgttaggaaccaaattatctataacatttaacatatttcgaagtttagactttagaatacaaatacttctccaacaacagactaaagagcacaagtagatattcactctgcattttattagctggctgccttataccaacaaaaaaatttatgatttatttatggcatcagataaaatattgtgccctgcactataccaacttagactactatagtacacgtgctttaacgcatgtcatgtttgttgttgtgaacatttgaaaaacactcttacatacacaattaattaaagttatatactaagtttgttagagtttgaaaaacactcgtaggaccctaactcaagtaaaaatctattttaaaaaataaaattaataattactatcataaaagaagttaaaagacttaaagatgatatgggattccaaacaaacgatatttgtttttaactatttatttaatattattttgatattattgtttatctcctaagaacgtgaaatgaacatctaaataattcatgtctagaaatataatgatatcatttagtcttgtttatgcatttttattcttaaaaaagcaaattatttgatgtagctcttaagggattaaatgtgaaatgaggtaatttagactctttcaaatgagggattatggttagggtaagttagtggataaaggtaataatcaaaataactttaaatagtggaagattcttaatgttgcattaagagtagtttcagtaagcttagtcccaacacattctgtaatagtgcttcaaccgacagctcatcccgagtgtgtgtgttctatctctttgatgttgtgttctgcttaattatttttatttatgttaaattttacattttcgtatcattattcgaccaatatcgaatttaattaatcaattctttaaaattagacatatacaaactctgagaacaatcaaagtttttatgaactcgatattcgatcatatcattttaaaatattacttggatgaattagtagatttgtcaaagagttaacaaaaacttatttaaaaataaaattaataattatcatcataaaagaagtaaagacggtatgagaattcaatcgaacgatatttgtttctaagagacaaatgatataaagtgtaattataaaaaactttgccagcacaatatatttagtcttgtatttggaaagtatttctatcaaatttataattaatctattatttattattgtgataacttctaatatttttttattcataaaaatagaagataatattaaaaatttatacagaaatcactcggacaccttagtttaccaactaagttaaaaaaaaactaagttaaattccttttacttccaacttctacctaatactaggaaaagagaataatgcaattcccaaatttatagcaatgctgactttctaatgactattaatagaagtgttatcatcacatttttttttctttagaattacacttgtaaacatatcttagcttttttaattctaagctctcaatataggtaggtagatagcatatggctttagtattttaccatgaacatggtatcatacaaaaagtgtaatgacatgtacaagaagaatttaagtcaaaatagcagaaattttgcacttccaaaatcacgaaacttaactaggtgagtgagatgatagacctatggaacaaacataaaacaggtttaggtaagatactttaattagttagtttctttcaaagctggaatgcataaattaattttaagagaaaaaactcgatttaatttatttttattttgttttttagaagagatgtttaggaggaggttaaatagttatcttaaattgtagatcgtaagacggaggaaatctaagtctacttatctttaatttaatttctagggattaaaaaattaaaacttgtttacttaccaagtgaatcccttccccttgattagctagctaattcttaggtacaaaatagaagaaatagaaagaggaggataagcataaaaatgatggaattggtgtgtgtgaaggaagaaatggcaaaattagagtcagcagtgataatagcgatgaagggacacccaggcagcgggaaaagcacgttggcaaagtccatagcctcatctctccgaatccctctgttagacaaagacgatgtcaaagattgcacccaacccttgctgctaacctcacccgccacactcctcaacgacctctcatacgacgccatctggcacatcgcctccacgcagctccgcctcggcctcagcgtcctcctcgactccccgctctcccgccgcgcccacctcgatcgcctccttcacctcgccgcctccgcctccgcccgcctcctcgtcatcgagtgcaggcccggcaaccaccgcgagtggcgtcggaggctggaggcgcgcggtggaggtggaggtggacacaagcctggcacgtgggaggaactggagacccttctggaag

SEQ ID NO: 256 - DNA, 5924 bp, Glycine max
attagtgccttggtagccctacctttggcggtcttgaagttgtaattggtgttggtggtcctgcctttggtggctttgaagttgtaattagtggcattgcctttgacagtcttgaacttgtaattggtgttggtggccctaaagttgcaattgatgtggacggtcctgcctttggtggtcctgaagttgtaattagtgttggcagccttacctttggcagtcctgaagctgtaattggtgttggcggctctgcctttggtggtcctgaaattgtaattggtgttggtggtcctgaagttgtaattagggcctttggtggccttgcctttggcggtcctgaacttgtaattggtgttggtgttggggattctacctttagtggtcttgaagttgtaattggtgcccttgacgatcctatctttggcggtcctaaaattgtaattggtgttggcaaccttccctttggtgttcctgaagttgtatttggtgatggtggtcctaaagttgtaattggtggtcctgaaattataattagtgcctttggtggtcctaaaggtgtaactagtggttctaactctaaagttgtaactataataataaatacaactaatagagttaaaaaatctacaaacactttcttcattttgcaaagctagtttctatctcaataaactttttaagagacattggccaccttgatgactgaaggtgtggttatgaaaaattgacttcttattattatttttacttggagtgtgtcacataaaatggcaaagtattgcttgtattttgttcattttcttatgttgctttaatgactttaaattgtgatggcatcaaactttgtgtttgttcatgcatttaagttcttgcatttatttttacaaaacatatactaaaatatacttctttcattccaaaatataaatcattttagagaaaaataatttaaaatataagtcattttacaaaccaatattacaataaatagtttttccaaaattaccttcaatcaacatttcatgcattaatacagtattctttttaattatcgtgaactatttttcctaaatcactaatatttactcatgcattcatatcattaattaattaaaaaaatcacttatttttccacaagtaacacttaatacaatggagttaggtgaaatgaaaaggtcttaattcatcatgtttgtataggaatttgttattatttatgagaattatgtgtactgagaataaatgaataagaacactatttaattagagataaaagagtatattaggaaatcactaatattttttatgaaattaaataaataaattatttttcaatacatgtgcaagaactttaaatgacttatattttgaaatgaaaggagtaaattgtaaaaaacactaaaaataaattataaattataattttttttatcaatataaaaatttaaatttatctttatctaatgttatccatattaattttttatttttctcaaactatactaaaatggtgggggaaactttcttaatactacaaaaaattgaaattcttcttatctagttctattcacatgatttttattattattattttaaattataataaacaaataattaataaattaaaaaagtgaattttgtccttccaatacttttatttaaatttcagagtgcattgcttttaatatttattttttatagttttattcaaaatatcaactatatataaaagatattcaaacatatctgtttaatcacaaactttattgtcatattaaaagtcatttaacaatgaacgtgagttattataattttttcaattgatttgtgaactagcatttattttttaattagatccttaccaagacctaattaaaaagcaaataaatttcaaagatcctgtttttttagacctaattaaaagcaagtaaagttaaaaaactcatttttgaaaaaaatatgctagtgatttaatcataaattgtgaaatagttaaggggcttgtaaattaatttaaccttcaatttattcaatatttattaatttgaaaataaaatactcattctaattattattataaggtccaaattaaaattgtgatttaatatttttttaaagttcaatctacattatcctttatatttattatttttcacaaaaatatccttcaataaaactagttctagaataatgtgacggtgagagaaacataacatattattgttatttagtttttgtttaaggatagttttaaaacaatatactacctacatctaaaaataagtattatttagaacaaaaattatcccaaaacatgtgtggcatttgacttttcaatgtaacaatattaattgctcttttccattaatacccctaataaatgttacttagcttttgaattcaatattactcttttcatttctatataagacccaatcatctcatttataagattaagaaaaatggttaatttagtttatagcaataaatttatcctaaatttataacttttcaaaactatctttgtcattaatatttttatcttttctaattttttgtcaacaaattctctatcttcttttaataagaaatatttttagtataaaaataattaatacaagtaacattatacatttaatcttataaaaaagaacaaacattatttcaaactagaatcttataaataggaatagaggaagtaatattattcttttgagtttatttaataagatttttttttataaaactatcactttcttttttctttcatctatttattattttttaatgtttattttagaatagaaggagtattaatttaaaacaaattctctaaattaaaataagtaaaatcctcaattctaataaattatttaattagacgttttaataataacaaaataaagtaaaataattgatatattcaatgatttttaattttacaataatttttttttatgtttattacgatgcactacttgaaagtgaaaaaaagtagtttgtattcaattcaattaattgagatttttaatgatctttagttgagaataaaataattgttatatttaagtctcataaatgaaaaaatatatatttcaatttcttttatatataaattgtcatattttttgcaccaaaagatgtgagaaactaattgcgtaataaattctaacgcaatcgcaattcaaaatcattaaaaattaaatacatgttcatggattcaattaaaaaaaatttaagaacttaattataagttattcctatcacctgcaaattaatataaccttcaatttattcaacaaatctttttttacacgcaatgactcttgttgaaaataaaatagtaaatcactagtaattaatatattcaatagttcttgattttagaataaaacaattttatgtttattactactaagttgcactactccaaagtcaaaaagtagttccgttcatttaattgagatattcaatggtatttaatttaagaataaaataattgttatatttaagtttcataaatgaaaaaaataaaatattgatttttttaaaagataaattgtcatttttttccaccaacgattacagatgtgagaaattaaatgcctaaaacaaacataaattctagtggtatcacaattgagagccattaaaccaaaaaaggggtataaataaaatacaacctatacttaccatttcctgtggtctatcctaaaccacactcgaagtaaaaaaaaaaactcaaaattcataaccactgctcacatcatcaaggttgacaaatgtatcacatttgtaggtatgtaatgaatatctctccctcaacctttcatccatctacatcaaaacacaagcaaatcctagaaattaagttcattgagaaatagaaactatcttgacaaaatgaaaagaagtattaatttgtaccattcttaactctgcaagttgtattaatccttacaattatggttgcagatccagcagggaagggctacaaatgtgaaaaggcaaaaagctcactaaagccatgcatagaatacccccgtcaaattaatcgatgcattatattttcaatttttcagaaatttgtgattgtgatttttgcttgtttgtggcattcttgattgactttgttttatctcccttgattgtgatttttgctcgaggacaagcaaaacttgcttgaataagtttgatgcattccattttaattaattaaattagtgcaataacttttgtcacacaggaatattaaatttatcatctatacctcttatatattattatgaattatgatttttgatgtatatctattatttttaattttatgtttgcatatttcaatctaagtatgcacttaaccttcaatagacttatttttctttatcacagtgtcatttgttgattttgtcaggaaaagtgtgttaaaaatggtttctttgaaaacatataggtggagccatggaggaatgatgttccaatccaagataagaaaaatctttggagtgaaaacttaaacttgtgacggttagatcccatcttattactcctcaataaactcattgagatcagtgtattaaaaagtgtggtataaatatttctcatctttttatttaattttaatatttactcatttttagaagtagatattgataatcaccagtcataaatttcaaaattgagtcctaatttgactgcaagtaaacttgcattggaacagaccaaacttgacaagtctttgggggttggaggcagaaaagaaaaccaaaaccatagtatccaatgagtatctatgtacgaagcgtagaaacgttccgtattttccttcgtcgttaccatttcgtataatagcacaacacataccatgccatggatcaattattaccagtcactgtgcattattgttgttgagtagtaacatagccattacccatttctctgtctctctctctctctctcacacacacacacacacatcacattctccgcctcttccactgaaatcccacatgaatgtcactctcacttcactcgtctctctcccccaatccctctaattccactgtttagctccgtttcggtgagatctgggaagctagggtttgaacttcaggttcgcaattagggttggattcgagcgtgttatgagagcaaggaggttcgggtgttgcattggaagtggctttggatgatggtgttctgtgggtagcttcaatttttggggtggggggtgggcaggctacgcaataggatcatttctgattcacaggggcatgcaaaatttgcgacttttatgacaataatcataatgcttttattcaacttggggtgcttcagtttttgctaagtttggaacttcacctattgttatagctccaagcatgaagctctcttcttctggatttaatcctccggctgaagaagaaggtagcagtagcagtagcttctttgattctttcattttgtgcaaattgctttgtattttgctgcccccactttttgaaaatttctcatgtattgtctttaccttggtttgttggtgtagttgtgttttttgtgtttgaagttttttttgcctttgcatgggtttggagggagggggataaggatactctagtagtactttacttgtcggtgtttgtttggcattattattatatggcatggagtgaggttgaacaagttgccgtagtttgtttttgtttgtttttaatatgtatttatgtctgggtcaacttcttagtgtcatgtcgatttgatttgtgtttgatttgtttcaacttcttatgtgtgggtggtgctaagtttgctggtgtgtgcagtttatgattttaagtttgagatgacaaggttgtattgtgtgttactattcatgtgtggttattctgtttgcctgtttgtttgtgtggttggagctcggattg

SEQ ID NO: 257 - DNA, 9635 bp, Glycine max
caaatcatccgcggaggcatctctaagtttgatgaattcgttgagtctatctaatccgtgttttgagctttaaaaatgtgttgatttttaatctaataacccaactaattaatttaatattcacaatttaagggcactaatatttcaaaatcagtaggtgttagtttggtgcttttcaactaatattgattggttctcaaaacgaaagtctgtgcaagtcactcaaagccataagttcccgtcgtcataggctgatattaatcgaacccacgttgtcggtttaagaccaagcttgtgactttcacgtgtcaatttgctgctttttatttatttatatttagtcagatgtcaaattgcatatctattaataaattccttatttcggaaaaacaaggagaaaatataatgtgaatgcgattataatttttaaataattttgtaatttgaactaataaataactaaaatgggaacaataactataattgttcaaagttcacatgtgatacagatctgtgtaacctatcctcaaggagctaaagagctgactttttacattgtcaatagaacacctgagaaacaatcgtaatttaattacgtgcagaaatgtatagttttaaagaagaaaagttcttatacgttcatatttcatgttcttttttcattgactaagttgtaacaaggggggaggaagaagatataaattccacatctaagaagagataaattaaagataaaatgaatgctactagtgtcaagttgataaacaaactaaaatgaatttcattacttatgctcacgagaaagaaaaaaacaaattaaacatagaaaataaacaggtcaagagaaccaagttgattttatgtttttcaatagatcgatactttttcttctttccctctcctacctgacccttccctaagtaaattgacggaaaatgataacataaaaatatgatacatatacattttctgcgactataattatcgttaaaaaaaaaactactgtacgtaattgtggaaaatgtttataacaatgtaaaaggccaatatatacaaatttctatttgtgtacgtactcctgtgtaagacttctaattttgtagaatacttcgaaagttccaataatagttacgtctttcttgtagattagggcatgtgactgcaaagtacaaacaatgcggcagttggaaactttattattttattaagacagatgacaagtgaagactagtagtggtggtggcctttttgcactagtaaagaaatgaaaattttcatttttctaatatgatttggacacatgataaatttatcctttttgggcattaatcattgttcttatataattgaatattccaggacagtccaaaaccgttttttaggacaaattgtatccttgactccctaccgtgttaatttatagtttttctattcttttctttttctttttgttttgggtagttgtgctatgatgaacatataagagtggaaaaatacatagtgctccaactcgggggagttttcaattttaatattataagactgcatgataaatgtggttcattacttgctaatatagaattttgtagtctttattcttgtcatcatcatattatatggaaaattaaatattaactaaatgttataattaaaatattttaaaaggtgcaatataaaatattcttacaccaatatcgtatttacaaaattaaaaatttcgaatttacttaaaaaaacaaataaatttaagataccataccggccttaataaaattgttgacaacttgatatactgatgtttgacgactaaaggctttactttaatttttacaaattctactcctataaattgaacttgtactatttttttgtttattaaaaatatttttctgttagctagagattaattttttagaataattgttatacatatggtgtaaaaagttttacacgataattcaattacattttcctatatataataagattattaattttttaaaataattattttaatttaatttaaacgataatttgtgattggataaaaataatgtaaaattatttttacattatcattatatggacattaaagagaaatatgaaatcattaaagtaactagtttatttctttcaataaaatctgttttatacaaacaacctatatcaatacactttaaaatattggcattcataatgaaatcctcgagaatgaccaataatagattctatgaaaaatagaatcttatgaatttattttgagaccaataaaaaatgtttaggatattgaccttctttctttttttgtgaaaacattgatttgagacttgacgtacgtctctcttttttccttatgttttaatagtattatcgtacaaatgttaatataacgtgcccattattacaagaggagtgcaagttacatattttttttaacatttgtactttttttctatttatcaaaattaaaaattataaaattatgaaattatgagtgagatacattaaataaataaaaagtaggaacacataaaaaaataaaacctttacaattttataatttttaataaatttcaattaacattagcgagtatgtttgcatttctcttattataaatatgcattcactaattataaataattatatattaaacttacaaacaattgtgtttaaatttggatatcaaaaacaaaatatgtgctggattaaggtttctgaagccaaatgttaacaagtttcacggcgtcttaacacgtaggttagtttttttttaatgagcatggattacagtgcaaataatataaatgtttgaatactctcagcttgagtgtcacgtgattcatacttgtgcagaatttatagtgttaatttctttgtagctatctgcatatacaagtagccaattcaaatctcaaatctgtatatatatgtaatggaggagtgtacacaattggccgttcttcagttcttgtatataagagatgcataaattgataaatataaatgctattgtacttgtacatgttccttaaatatatgactagaatttgatggcttctgtgtttccgtgcatgcataaggtaagcaataatttttagtttttttttacgcaagaatttttagttaatagaggtggaaataagttaattaacctaagttatgttttacaagactcgagtttgatttacattccaaatcacagattctaacttgatctatttatttaataaaaaatgtttgccagaatctcattcttgctatcattctttgacatgtatatgggttgggtattccttgtgcccatttatatatatcattctttttcgcaaataaaaaaaaaaccatcaaatctttcttaaaatgacaatataggttaggttagaggtgtttaacaatcaaaacaataattaggtacaatcaaaccttgcttaaaatgataatgtacactaagtaaaaagtttagaatgacagatggatagactatttcaattcaaacatgataaaaacttggacaatgttatcaaagactctaatatatgtctaaattaaaataccaattcaattatataaatcaaacactattttaaaaaaaaatagatatcccaaatggcataatacatgtctcaaacaacactaacaattacttaaattacatatataataaatatgtatacaatattaagtgaggagtctgggtaaataaatttgaaacttattaacctcacaaacaacttaacctaattataattaggtcaattgaaattatatttgacaagacatctaattaatttttaatttttttcttattgaaaaatttatttgattatttaattaaaaagttttttttagtagtttatagtattttttaaagtaatattttttaaaatattagtttttaactttttatattttcttttttttatccttaatatatttatcaaatttcatgtttatcttttttaaataaatcaaaattttattattttttaatcattttacattttttatctattttaacaactaattttatcatatttataatttaataaattaatttttcaatttttaacaaatttttcaattaattttgtcgaaagataaactgacttgatgagcgaattcaacttacataaatgtttttttatgaataaatactaataattagtatattatattagtggaaagatttaaatttacgaccactttgctccaaccctatagaaatgttattactagtattagctagttaatcaaatttacaggtcaatacaccccctaatttgtgacaatcatttggtagatcaacaattacaaaacttgcgcattactcaatctgtttagcttaaaccttgggcaataaagggataataaattctaagtagttttgaaaagagtacacagatgttaactgtcaagtgactttcttctgtatagatattttattttaaaaaaaataaaataaagcgttgaggttagttgcacaattcttgaaattggcatgtctagacgactgtttaaagtttttttgtttcttgattttctcaactagtggcgataaaaaattgttttgaaagaaatgatagtagtttaagtgtaatttactgatcttcttttgctccaaaatataattgtcgttttattcatcgtcaccatgattaagaaaatattagacaaaagaaacttcaacttggtaactctagcatttgcaacaagaaatgaaaaattataaattaattaaccatttaaaaattgaagaaagagaattacagataacaaaatttgaagaaaaattatttcccgtgtaccaaatttatttttttaagaaaaacaccaccccaaagaaagtctttaaacatttaatcaaccaaaatttgaagatgatcaaagaaatagattttcgccttgaaaaaaaaaaaactattgacaatttgcctttgcgcaatttcctcaactttggtggttgatttgtgatgccctcttccaaaatccaaacagttaatttctctctttgggtccgtcgaatcgaatcaaatcaatcagtgagataacttcaaataaatacgatgataggcatcagatttgtcatcaaaagacaagaaattaccaaacaaaagcaaacaaaaaatagttgagctgacatgggtggccacagtctcaagtctcaaccactgtagctaccaacaaattaaggctcaaaatttaataagtatctagctatatatttgtcttgattgatgatgcgcttcaaaaaattaacacttaggatgcaaggcagaattttaaacgagactttttttaattaatgttatgtgtttttttttccaagaactaaaatttgaaataattgtgcgcctactatatcagtcatcatatatatatctttgtcattcttagtttaatattttttttttttggttattacattatatactgttacaagctcaagtgtgttgatatggataggatagctgtatcttaggtactgtaacaaaaagtattgtttattttagtatttagtggcctataacaattttgtccttaaaaattatctttgataaattaaaaaatagtatttatgaattattacttttgatctttttctaagctcaaagttgactgacatttttttagagatatcacatgtaaaatattattagcttcaatgtttgatggtctgtgacagttttattcatacctcaataaatcaagagataagcgtctataaattatcttccaccttaggtgatataagatttttagtgtacctaaacatgtacattaaagatatagtttaccttttgatagaataaaatattatcattttcacgtgaagatgaattttgataattaaattttgggtaaaatgactacatgttcaagatattgtttttgcattcttaattatcaacgacgaggtacttctcatgctgtcaggtttttgttgtcaaatgtagcagttaccacttttcaacattcttagttaacaactctttactaaatgccatcgtcaaaacacatagttatatatgtacatatataattcgccgataaaaataatgtacatagttcaaaacaagtccttatccaagtcacaataatcgttggcacgtatatttatttatttataactactaagaatggtaaaacttgccatcgcatactgttttgccaaagttcttattaggtggtttttaactttttatatgatgcacttgatcaatagataattgttcagtcaaagaaagggaaattaatgaacaaattaaagataataaattttataagcatacttactatgaccacatacttatccgtttccacagtatatatatatctatgtatattggttctcctccatcatcagcaatgacaatgaaactatattgaaatatatcccctttgttcattgaaaagttgaaaaactcttaattttgatcgtatgaacatcattaccatcgttgtcaatttcatcattagtctcaacctctcagccgttataaacatcatgcagccgcagtttctctttctcttcatattcatgaaggaaaaaaaaagtgctttgtgggatgatactaaatataattaaacttttcacttgggcaaatttgaatttgtctgattgagcaatttgcaggagcattcttaactaggtccccattcaatttttcccatgtctaatacaagtcaattagaaacaatttagcatgtcatctttagacaaagcaatgatgatgttgctagattaatagactaaaatccctgtggccaaattgtggatcgttcttgctaccttcttgatggggataatggggattctcttatcacataaaccatttttccatggagttcaatggggtggcttgtgtttaagcattcgatttcatatatttttgggtttggttagcattatgctttgagttatcctaatatcggtttttttttatttaattagttatcctaatattgtttgatgtctaatgaacttataactattttgataattaataatacatatgttttttaatttacaataattcattatgcttaactaggtgaagtaaattcattgctagtataatatgtgaatatagttgttgatatatataattggtattagaatatatatggttcaacaatcaacatcctttagtttttaatataattatacttgtaatatttaaatttatatgtcatcaaactatggaatcgatgaacacattcttaatcattatcatgtatcaacagatgacccgatagggttaggatctacaaaaatgaccttataaaatattatattagcttcagcctctcatgtgaacccctacaacatatcaaaattataatcctaattggctgtagttgttacgacagtcacatatatatgcttagattttattttaagaattacgtacattgaatttataaaatataaacaatatactctttatattttaagcaatttataaactaaacattttcaggtacttccattttcagacacatattttttaagcaatacaaaattaaattaacattaaatatttacagacatatagcaatgcttatatcatccaacacaacagtaagcagattaagctgaatggatcatatatacccctcctatgtattctggtcataatccatttgtcgttgcttgtttattttttcggctgatacattattgtggttgcttctaatttgaaggcttttgaatacttcaattcatcatgatatcatcccactcaacaaactacaggtccatatacattccggatcatgattcgtgcgtgcacgaatctcaccattcaaacgggcataatgatgaaaagctgacattgatcattcctttttgctaatatgattattaataatataaagttgggtgtctgcgctagttaatttgttgtgtgaaatggaatatggtttggtattttgtttaaacttgaaggaaaaggtgaattgatccattctttaaaaggaagatttagtcattacaatgcatcattcctgtgcttcaaattataatctggtccaagcaaatggaaggcagacaaagaaagcaaagccaaaacatagcatcatttattcacttttattacatttttttatatctatttatcaaatggtttgggaattaggatagagttgttaaatgggctgagccaattctactcagtgaactaagtatggaaaactagctgatatggcttgacccaaatttttcacgaactatttttctggcctgatttaattcgttggcccgttgagctggatcaaattgatagttttttttgtctatatatatatatatatatattatataaataaataatatcaagccgaataagccttaatagttttcaaaatagtattttacagactcaaactggttaggactgaaacttcatgcactctacaaattttctaccaagactcactttcattacgggaggggtaaacggtaattctgaatgtatgtttacattctagattacctttttatgtaataaagagggtgttggcaaaaaaaattagagtataggaagaaactccccctagctagtttttacgcctctagccaggcccgcatcaagcaggacttgttaagagcctttatcttaagtttaaacattaaaaatttcattttgcttgcatgaataaaaaaacaaaactacaaccaaaattttgatggttaacattaaatttatagacgagttattttatttttatgattattatgagttattgcatcttacaaaataatatagaactgcaattaaatcatcatcattattatgataaccataaatagattttatttatattttaaatagttttgcgatgcaacaaattatgaattagattataaattgcataattttttgtagacaaaatttaccatgataacttttagtataacaattacatcgatgaaactttaatatttgaaaaaagtaaagttatgatagttataattttgcctatataaatcatactcatgaaggtaacactatataattcaatagttagatagataaaatcttaacttccatagtgtacatagtacgcgcattttatcataatctcaaccgttggttacaattgcactttattcttaaaagtgcacagctttatttcacagaggaattaaatccatctttctaagacagcctgtggtagctcattagaactcagtagcatgatgttgttatgccagtgtcaagagtctcaaagacaacacacaccatctactgctggcatgtgtacagcttgcaaatgtgttaaagaaagtgctacctgatttttgcttatgtaatgatgttgctgaattttctcataccaagtgtggacttcaatttcaaacagtatccccatctcccgaaacatcaaatgtgaagagtatagtatgtatattgcaaatgatatgatgggcaaccataccacaaaagctaaccgttgtagttggagagtccaaagccatataaacctcatattagaatctcataatttcaatgtaggactcaagttccataccttgaatttggatcccaatattccaccacactaaacaggccacagcccctgcctgcgcccatgtgggttggatatgcactagctccggtcaaacacagtg

SEQ ID NO: 258 - DNA, 5311 bp, Glycine max
atgatgtgaccacttggcgtaatttctgtgctttaaaataataacattcatgactgaaaaagtaggaaatcattttattttgatatttctttctgattattattagcattttagtattagtttgaaattgaattgaagacatgatgagaatgattacatgtattaaaggattgaaccgtttagtgaatggtgacttcttctcaaaacaagaaataataaagatactgctctttttaagagtttctaaatcagaggtccatacttatcattctaatcatatttatcatttttaaagaaaaatatataaaatataattatatctatagtttgaattgaaatattttataagctaaatatatttgttgaatataaagaatattccaccccattagtatttaatacatgtattaattttaaaaaaacacaatattctaattatttgatttgatattaaaagtataagttaaaaatgtacccagaaaattatgaattaaaaaacaattaatttgaaagagtattgatttttttttataaaagcattatatatcatatatttgaaagtttaattttatattttagtatgaaattatgaaaatatatactgttatttaataataatagtaaacttaaagatgcctaatatttaataaactatctactaaaataagtaaacatttaatatttagcatgttaaacacgcctaatatttaataaaatactattaaccaaaataagcaaacatttattattagcatgttaataaaaacacacaaatatttagcatgttagacacgtctaatatatttgaagttaaacgcgcttttgaattagttttgctaaagtcaattacaaatgataattgagaaattaataaaaataaaataaaatgcttagatgagttgatttctaactaatttaaaaagtgaataatagaccagttgattagattgtagatgtctagtattttaactaattttcacattaggaaatgcagtggaggcacagattacagaatatagtggaagtgggtacagtacaccatcaatttgttggtctgaatgctgctctgattggtggatctgaatctactgatcactcacaccataaaagtgaaaactatttgataaaggaaaagcctgcaaccttcctatcttttccctcacaccaaaatgtatcattcaaattttaaatataaaataaaataacgaactacacatcagatgtcgacatactatgggtgccatgattctcttttaaaatattacttgcagctaatattcactcaaatttatattttatagatttttagatagcatcacttaattacactctgttttctttaagaaattaattacactctgtttgcgaagtaagaaatggtgcaagttcctgtaaaaaagaaaaagaaacggagtaaataaaaataggatagatttttttatattgttttgtctaagagaaataccaagaaaattgaaaacaaaaatattatcagattttttaattgaatagaaagagaagaaaaaggaatacaaaaaagaaagcaaagagaaaaattagattaaatataaaaatactattttattcttatatacaaattctcacatgtgaatattaaatagttgtagatccaatttgcaagacataatgggttgcataattagctcggaatacaatacattacaagttttagtgtgcatataatgactatagcagcacaaataatagattatagaggcaatgggacatacataaatattatcgggattattgtaaataagaagattctgctgacttcgttttttcgctatttaatcactggtttggatattttttttttccttattatttcatgtcaaccaaaaaatcttatcttttaactttcactctatttctattcacttctcagttttgtactcatttcactcttaacaaaacgagtgttagttagcaaccgtgatttttgccttcatagatttctgtcttttggttatactaaggagaaatatgaataataaaataaaataatgtaaaaaagaaaaacaaaacattaaaatgccactctagttcaacgagaggagaattgaaactgccacgtgtaagtttttgcactttatttaaattggaaatttattttcagtatttgaatgcgtctttggtatcggttctaggaagtttacattgatttgatttcggcaactagatagcaaaccttggtacgagataagtttgtggaaaccaatttcactttctcctcacgtttttcctgaaagataatgaacaccgcatcagatctaaaacctatttaatttattgtggaatcttggtaattccaaatgttgccctaaatgaacctatatccatgactgaccttgcatacactttaattagggatgctacgtacccttttttaaggtggtccatctataaaagtctagactccatagcaaggtatctagctaaagttttattgattaattaaacccaccaacctatctatctgtaatatattttatatgtttttttaataagattttattttgttagttacatagatcatggggtttggataatgtaatgaaatgaacgaaaaggttctcaccaaactgatattagtatatatgtaaccactgctaattttttattaactaatccactaacttacacgtaactacgaacattatcgttgataattaagtatgctaatggtttactaaattgaaatcgggatcaactaactacaattaggtttactatagtttgcgttggatgttgatgcctagaataccaacacacgtgttgacaaacagaaagaaagtgaaaaacacacgacttggaattatgcttaatttcaagacgtgtaatcggtgtaattgagagatgggttcctttgaaaattgatttttgtgtttatttgatcgtggaagtttggtaaagtttcgaagtgggttttgcaaagttgggatgcttgtcttcgtagctaaaattcagtaatgcgtgtagtgcgtgaaatactttcggtgggtttgcatatcatctttatataaattggaaatcttgcacagtccacacttcatttgtagagaagaatatcaaaagacacacttaataaaatgttttttttttaatataagcactcaaataatcaactaaagaaccacaataatgtaatttatttaattttcaaacaattgtttttctttccaaattaagcttgtttttaaatagttttttttataaaaaaaaaagcaaatatatattaatagaagcaccagagatgccaaaatcctgagtacaatgtgctcgcatgctaacaagaaataataaaagaaataataagtattggttgtttctacatttattttattttttaataaaatacagtaggctaaagaccagcatgtgcatgtcaagactttatttcttatacaatctcctgaaaggatatctcctctacttattcaatataatttattatatcttgtaatagacatgtttcacaattatcatggaagaaaagaaaaactcaactttcttttaatgacaaataaactcgattgagtgtcaatatctgaaaaactatcgtccccaaagggatttttgtgcttgaaagtttaaaagagactttttcttccattagtagtccacaatatgttttgagaaaaaatcttaataagtaggtttttatctaatttggtaactagttatgtttaacaaaaatagttgataaattaattgaaagttataaaatatatgcttttaggttgaatttaatttgatctcttattattttctatttacagatcaaatattttattaaaaactaaaaataaattgaattaatagtatagaaaataaaataagtaatatagcatcaaaggaggctatatatgataatttttttattaaaatattaatgataaaaatgaaagaatttttttaaattatatttttttttgtggaataaaggggctaaaactccatgttaaattatatgctacaagttacgctattttaagtagaaaacgaaaaataaaacgttagaagtaaatgagattaatttatttatcaaacaattactttagccaaataaattcataaagtaattaaataagttactagataactaaaatagtttaccaaactcactgagtgatatttggtagttaatgaaagcttaaataagattaatgtggaaagggaataatatactttatcgaattcatgcatgagagtaactttatggagaatagaacctaagaacaaaactttagggaaaacggaataaagcaaaacctcattatttatttatttaatttaaaggttgtctataacctaattaaaatgacaaaatcttaccaatttttcccagaacttttcaattcattcacatgttttctctaaatttggcgttagccattaattctcccactagtttttggctttggtctcgtcaccaccaataaataaaaacggtttgagattcctgcctattatttcaatataaacccaaaatgaacaacgcaattaggaattgaaaaaaaaaaaaacacttctcttagatagaattcaatcactaatcctaatatcatgtacaagcctggcgtacatacaaacatgagcaaacacatgacacaaataaacctacgtttttattattgttaatttgttatgaatcaagaaaaatcttaaacaaaattgttctcatattttaactagctgagaaaatgctttctgacttcttttctaatttaaataaataaaaagatgttagttgttcatcactccttacacacatttactaatgtgtaaatattaaggttttatttggataaacttatttataagtacttataagaagaaaaagataaagtaaatttttgcacttaatttatagaagttttttttttcatttaatttctataaaagttatggtgcataagttgatcttagattatagagaaattgaatgtattttacctttttattacactctttctaacagaattttttattattagttgaaattggtaggaatcacaaaattgcttcggtttcactttatttaaagaaattttttaattaatcaataaaaatatgtatgagaaaaagtgtgttagataatatggtttcatgtttattattatttgatggtcagaagaaaggtgttaggatcaattgatagttcatcaactgttagttagctttaagccttcaactgaataatatagttagttaaagtggttgtacagatagctcacaaattgggccttgaacataaaatccaaaaatgtgatccgtgagacaggcc

SEQ ID NO: 259 - DNA, 9530 bp, Glycine max
cttggccgtagttgaaggactcacaaatgggaataatgaagattgtgatgagagagagtaaagcagtgcatagtgtcaaacaccctatgttcttttgaacgttgcctttcttcatttccctctctctccctatgctatgtctttgtttctctttatatatgctgtgtgttgtgggggctatgatttacggggtcgttttcgtagggtcttggttagtaataggattattggctagtgcattttgtcttgactacttattttaaatatttcattaacttttttttcactatcacatcataatcataatgagggtttaggataaattttttcattttgtttgtaaacaaattcaaacggctgaatagaatgtaaggaaaatttattttataatcaaggcgcgtgcgaaatatgctaggggtgaattttctgtgtaattgaacggctttatacatttcaatttggaacgataaggaaactaattcgctaatgtatagaatggaacctgagatgtttgaaaatgtatttttcaggaattcaatcaattcacacttgtggatgctagctagcataacggtatgtgccatgtgtattctcttttaatgtctttgtgcatgtaaatttcacacttggatgctagtataacggtatgtgccacgtgtcttgttttttttagtgtctttgtgtatgtaagcaaatatatggttggtaactttattcatgtaaattcctcacagttcaaaaacgaaagaactgaactacctgtgtatgcatgtaagcaaatatatggtaggtaactttgttcatgtgaatcctcagtacaaaaacgaaagaactgaactaccaaattcagttttccaaaccttcagtccggttgattaattcttttccctttggtcaaactttctattttatgtttggcttaattagacttttcctatcttagtattataaattttcttatttctttaaaatttcattttgaatcataaatatttacattcttacctagtcatttaaaaaaataggattttttttcacagtatttaatcctttttagtatacatgatattgtgctaatgcctaatgcctattttatatataatgaattgtatttattttttggttatgtttttttaaaagcaaaacgtgaatattaatattttactaaattaatatggttagtatgtgagatggagtcatcaaatattagtttttaattatatggaaaataatagttttgggtaaacttgctaaatgcaggctataattatactcaacttgatcgaatggtacgtgatagtatgataacttcagaacagggacagattcaatttaggcccaactgcggaagtgcccccaccaaaattataatttttgtaaatgtaacatgtatgtatagttataaaatactttcataatttgaaatgtaattaaaaaaaatctaaaatatgaatattgttcccactgagttatatatgtggatattattcctacaattgattttttttggatccgtgctgcttcaaaagctattcaaccatttaatgtctttatgaaataaaaatacagataatacataagaactttaatccttcaattgtgaatagtacaaattatttggataaaatgtatttgttggcctgctacattatatacgttaggatgccaagcccaacttacattaataattgtgttattggaacatctctttcttgcaactccatattttgcttcatgcactcccaagaaccagcaagtttattgctctttattatgtttgaaattgccctacgttgtagagtgttttttatgttgtgaaactgaaattgtttaatttgaacgcttttgcttatgattttttaaatcatctgcataagaatcttatgaatgtacactaataagtgcaaatgggtaagtgaaacaagattggcaaacctgagatcaacgcttttgcttatgattttttaaatcatctgcataagaatcttatgaatgtacactaataagtgcaaatgggtaagtgaaacaagattggcaaacctgagatcacagagcaatattaaaagaattgaacagtactttttttttaaaaaaaaggcttggacagcaatggagtgtatctagtgttttcaattttggcaatagtacaatatctataaactcatttaaactaaatttaactactccgtatttgaagaagctaaataggataggactcgtgagtcgtggataaaaagatgagatgttgaaagaaagaataaaatctcatactctctacaacattccaagcattttatgaacctaacaagacttttgtgtgagtacaccaattatcataataatcattggtaagaaaagggaattaatcaagttcaagtcatttttttcacctcttaactcactaaatgtttctctcaatttttagaacccaaactctgatacaattttgttagaaacaataaaattatagaaaaatagaagaaattttgtattctttgtcttctatttattgtagagtaacctctaatcattacaatcaacctaatgttaatgttaaataattttttattacataataaacaataataccttttaaacaataatagtattcctttatataataattaaaatacaaaaaataagttggtgcgaaaaatagaaaaggggtatgaatatcaactccctatcttaattctagaagcctacccaaataattgttttgtctattgggcctgataaccactaacgaaatcgtcttcataaatgaattaaaagagatgctgataatgaccaaaaaaaagcatctgtggaccaaaataaaaatgaaaagcgtaggaccagaaagatacagatttctaagtttccatcagtgacctaaaataataagatagaggtatttgttgttgttaactgtttaaaatttaggataaactatctttttagtctttaaatttttagatttttttatttttagtctctaaactttttatttttattttgtcttaatttttttatctttacttttagttttttaaccttttttcagtctttacctttaaaaacagattaaaaaaatttcaaggacttaaaaataaaaatttaaaaatttaagactaaaaaaatatttaaattaaattgatttcatccacttggttctaatagttgaggaacgtattattggttctctcccttaaaacacacgttaagttttttctactcagcagtcgcgctcctagaaatcttccattattatgtgtgtgaaagagagtgagaaggaagaaagtgaaaaaccaattaatcaattctactcaaacaagttcttgacgcttatggatttatttaatcaggatatggacaatcatgactttcacgattctctgttttacggcttccacattatgatttacataattacatgattatggcttcttggtctaattcgggtatagaaaatcataatttacaaaatccaatcctaatatattgataagtctatgtttacacgtctagttcaatatattaccataatttgttcctgaagttaattctttctaaagcaacttttggttttagtttgaaaataatagtatagataagggtgtgtttggtttacattatattatatttttatttcctgtgtctccattttttgaaaactgtttttattttcaaaatattaaaattctgaaaataattttttattttttatttttaaaaaatataaacactgaaaatgcgtttttaacaagaaatatatttctagatttacattttacttaaaataatatttttggtttcaactgaaaacattgaaaataaaattttattattttcaatttttgattcgtttgggaaaatatttttacgaaaaaaagagaaatccaaccaaacaaatttttattatcattttctattttctaatgaaaatagaaaacaaccaaaccaaaccctcccatatacttatgttttctaagttctaactatgtatttcacaactaaacatgagttgtgtcgtttatgttcgagatgaacgagttactcctatttaggttgtaggcttgatgccatggaaaaaggaaatctattaataacctctttttttttgttaggatagggggtggctagaaacaaggataaatgtgaaacataacgtctacacattatgatataaataatatgtcccacttccacccaatccatcaattgggacctccttgtccttatctgtacaataaaatgcgccctcctcaaatggttggacagaagcctctctccctaaaatatatatatatataacactgccccaatcaaaacctagcaagctaaaattggtgaccaggtgaaccaaccagaaaaacgtagagtgaacttccatcataaataccgtcaaattcctaatggggaaagtaaggtaaagacattaaaaattgcccacataagcttatgtatagttttagggatgaattcacctaaaatcttaagttttaaaggaatactttacatattgtctaagcttaacgcatgaatgatgtattaacttgttctttatctgtacttttgctgaaaatgaattttagaaagaaaaaaaaataatatgaaaaaataaactactaattatttaactgtaaaaattttaatattatccggaactaactccttttcagaaaaaaataaatgaatttgtgaaaaagtttatgaatgattttatttctattatctttgttttattcccctttacaaatcgtgttagactggtaggttggataaccaagtgtaccagatgcaattatatcaaatgtacactttgtttttaagaaattgaacactatgaagtatgaatgaatcttaccgacctaaagagggtagcaatccaaatcgcctgccattttttagtacacctgagagtttaagtgtagaaacgtcttagctccctattgattatatattaagatttttaaagtaaacgatacctgtgtgaaactggcaagaggcaaattggcaaacagttttgacttgatgaaaacaaaaggttcatttagtgtgcaaaatatacagctaaggatttgttgataactaactaccattcgataatatgtctttttgaaatttatatggattaattataagtagatcattagttgaactagatatgaataaaaaaaaaacaatcattaattaaattaatgcaataatgcaccaaataaaaaaatatctttcatctaacaaaaattttcagtaacaagttccttttacttaatttggataacagtacatgactgtgccgacctgaaatgggaccttcaattcttcatttttgtggcgttgagagttgaaccgaaagaaagaagaaaatggcctccaactccaaccacttcctttggttgattcaaagataaactcaatggctgcccttattgttaattttcttttcggttaatattaaattgaaggaaagaatggctgcagaaaacaagtaaaattaatgttttattaattggcaccaatgtattgattactaccttcgtccgcaagtatttttaattagcaaaaggcccagcaatacatttacttatttgattgcattgataatggcaaaactagttggctgtttgtgtaagtatagaagaatggggcatttcaccgactaatatacggcccaataaatttttctgtatcaaaagtattaatcccacgtcattcttcttctgttttttttttctttcttgctaatgacgcgtcatttttccttttgtcatttgtgtttttcaaacgttgtccatgcggtgataacaaatgaaataaatttaattataactaacatgttacaaaaaaatagacaaatataaaaaaatgtctataattatttcctagtgttgttctttttgcttacagagatataggatgtaacaaccatgttgacagttttgattatgtaaactaaaataatgtttaatgaaaaccctttgaaaatatgacatttaggacaaaccaatgatcaattaaatataaataaaggagtaacttgagtttttggttataagtttaattatgtatttaattcatatagtttttaaatttatatgtgaattttttttcctgaagtttaataagttaaattttttagtttttaaagtttatattttaatttttaagaggtttttgttgttaaaattttttaactctgttaattaaaaaattttaacagcaaaattctgttgagaattaaaatataaactttagaaattaaaatattcacttattaactctaaaaactaaaagaaataaatttaaaaattataagaattaaattgataattaaatatatgttactatgttaggatatgtatggatgaggatttgatcaaaaacgatagcatcaatctctgtttagttttttaaagatttttattttaaaaataattaaatgatcagtacaataatttaatcatcaaatgatattattttaatactatgatatgtaaatttatttattggggccaaattaagctgataccaattacaccctaccccaaagtcattattttaggctgcgcaaaaaaagtcgtattttagagttaatttaccggtcactggctattttaaaggtgcattcacttgaaattttactaattttatttttcatatggttcctaaattaaatgtcattaatcctgaaatacatatcatataatcaaaggacaaaaaaataattttggcatgtcatttgtttaaaaaaacactttatcctatcatttaatacattttattatacaatttaattaatttggcagcagacgaaataaaataaattaatggtatataatttttttacactgataatgtattaaaaaaaaatcttactctagatctaatatgtctgtattggttatatatgtatacatagattaacaagtcaaaaaataaaaataaaaaatggaataatttttgctgttgttgacattttgattttttttctttactttaaattctttagctatcaaccaaatctatgagatagaaatgagattaataataagtgagcatgatatatgtgaaaaataagaaaatgtatagaaatcctttttattgctactttctataaaactggtgggaaaaaagatggaatttccacacgatggtgtgtgtattagtgtccttcgctgctttttgagaatttgactgagataaaatcattatcatttatgggagtaatggttataatatgtgtttggatccaagtcataatctctttttttagattttctctccttgaaatatagtgtgatcgataatagcatttcatggtgtgatcggggcaccgtacaattctgtcaaatttctcctttctcaagtcttcatcgctacgtgcccccttcaaatgtttgtacaagtcttgtagctttccttggtttcacatttcatctgcaccatttgattaaataaggatatgtgcgcctgtttggatattcgctgataaattataattgattttgattaaaatattttttgaattggtgtgatttaaatttgagtgtctctgttataaaattaagttaagaataaaatttaatataaattttgtatgaaacataaaaattatacaaagttatttcaacttaattagtttgggactcaaaattaattttgatttcttttctaaaataaaattaaacatctaaaaatttatctaaaatcaataaaactaaacagcgtgtactatccttgagtttttttttccgtgattataaatgaatattattttaatttaatttgaatgcattcacggtgtgattttatccttcatccaatcaagtatagacgtatagtaatatatcgtaagttttttttttttttaacttttataatgactacttaaactcattattttggaataatgtccgttagacatggaaaaccaatatgattgaattggcctttctttagaattgcggatagacgttagttaacaaaacaagacaagatgccatagcggcgtatatatcaaggtgctacactttttcttctttatttgcaataggaaattggaaataatctgaatattgcattcctcaagtttatgtaatggataccttataatacttcttttctataaaaaaattcactatataagttctaaataactaggcatatcgtaggatcgaaaaaaaaaacagtgatttttggtaaaggagaagagaagcttgattaaatacggaacttggaatttgtccactctaattatgctattacctttgttttaatatcttaaaacatttggatatatatgcatggttctgtacattatatatttcggtatagttgtgaacacagacatgatatttgaaaagaaaacctagattaagtaatcgtagtttggctacctaattgctgttagattttataatttaagcataaattaaataaatggccatcaagcttaagattttttttcctgagggaaactttcctttttaagcaaaagcacacatgtttcctgataaacgtgggatttgggtgcaacacgagagaaacttctaatgctctgtctaagaattttacattcctagtcaaggagaagaagaaaaataagaattacaaattttccattttttttgcgaaaaaattctattatataatggagtgcgtttgcgagaaattgaagaagaatgaagggaaaggatcacagaaacaacatttttggaagagagctgacggacatatatgaccttaaaattctttatatcattaatttactgtactttcattggtatgaactttgaacaaacagttgatcgagccaataatgcaatactcccatagcaaatgatagatagaaaactgattctggcatgataaaatcataaaataatagtacgactctgtcatgatgatgatgcctactattcatttggcaagagaattgatgaattattatatatacagtcctgaattaattgattcccaccaatttatttctttttacccagaagaaacaaaaacaaaggcaagcaagcacatgtaatcaaattcaaatcaaagcagggctggatggcaaagtccaacgttcaaatttgagcaaaattattgaaaaataggccgtaaattcatcattgtttcaaaatgaagccaataataatattagacattgtcgggtatagaaccaaacatgtacctccagtcccccttgacattcgcgacaacatagcccactacaggatccaacggacagttcagctaacattttctttctgttgtcttccgcaagtagtaatagtaacattttctaacctaacattagcggttctgagagtagtgcattggtgggtgggtctccaacatgggtcaagggtcccacacggtgtaaagtgaaagctcttttccttcaaccacgttggctcaccaccaccaagtccatgtccccactcccctctataaaattccacaccctctcctcacatactaattaactgcaactttcttttcttaatttctctctattagtctgcatgctctgcaaactgagcatggct

SEQ ID NO: 260 - DNA, 3000 bp, Glycine max
gttgagggggttacgcaatgttcggagccacgttggtaaactgctcctctatgcatcatggccgagttcatgggtggcagtcggggatctccatgagccgagcaagtggagccctacgagccgagcaagcaaggccccacgagccgagcaagtgccgagtttcgtgagccgtacggtccagttttttcaatttttatattagttatcagactaaatatattttttgtttctataagttagcgttttttatatttggtctctataagttcatttttctaattttagttcccgtaagtttatactttttcaattttggttcttataagtttttttatttatttttaatctttataaatttgtgttttttcaattttaatccctttaaaattttaatttttatttataatccttataagttcatgtttataaggatcaaaattaaaaaataaatatttatagggactaaaaataaacaaaatatcttatacagaccaaatttataaaagcattaacttacaaagactaaaattaaaaaataaacttacaagaaaaaaatactaatttattagaacaaaaatatatttaacccgcgttattattactatttatatgtttttgaatcctggctcctgattgatctaactagaggctcatatctgactgttttcttttttttgaaacactatactgtttgtttggagaactttgcaaataaattggagggttacaccacttggatcgaaaggatttattattattattattattattaatactattattattattttgtttgttgacacttttttctctttctatgtccttgtttcttttctttttcggcttgcattacgctaagttcaatacaaaagatgcatatgaaaataaaaagcaaactggacaattcgagcaagaaacaacaaatacaaacaaacatatataaaatacaataaagaaaaacaacaaataaaaaattggtcagttagcctagccgggttcggcaatgattgttcctcgataacttgcaagatatctttgatcaaaaagtcaaatcaatgaaccaagtctattttctaggctataagtacagagcagaagaaagttcaaaaggaaattttatgggagagcataggatagaaatcaccaaaatttttaaagtaaattcaacgctgcacctgattgacaagtttggtgaattttatattattatataaaattaaatatctcttaaaaaaatcattttttaattatagatttcattttataatttagataatttttaataaattttacatcaatctcacttttaaatattttatttattttctctctcacgtcacttgtcaaccttctcttttttttatttttttcttttctcatttccctatcacatgttgtcttctttcttcttctttttttcttcttcttcctacgccattgctcatcccctttcccgtcgcccttctcctttgctgctattctcccttttcccttttcctccgccacaaccccctttcccctattggacctccgctgcaaccccttatgccataatgtctattttttatttttttttttctgtctgttttactttcttcttcttcatctcttttttatctacgggatcttcccgcattttgctgttaagaaaaaaaagtaaaaaaaaaaattgatcaatttacagatcttcaaaaatcttgtaaaaaagatcccattcttcatacgggagattttgcttcatcctttaataaaaaaatttgataaaaatcatatttttttattaagtatcatgttatacattcttaacaatacattcttgagataattcttctaacaatattttatcattagttaaaacttattaaaaatttacaaaattaaaaaagagatagtttatgacttcttaacaaattttagcccacaacagaacgtattttagaaaatgtgttgatggcatgctgattgatcaatgtatgcatattgattcacacaagcaaatgagcatgtataagaccgaacccataagcacaaagcacacgagcaatagagcaaacatcaaaatatctaacaaaagcacacgaccacatgaatttcagacacataataacggttttgaacaaaaaaataatggtctcaaaattagggatcccgtactatctgacagaaagaaggaaagcaaatgaaaattaaaaaaataaaaataataataataaaatgagatcagtcaatttttttctttttttatcaacaaatattaattattaacttattagatttttttgtcagaatatatttgaattcaagacctcttttgaacctaacatctctctttttcttttattttttcttcgaccactaaattaatctcataattttatcatatttttttctttctccgtcgagctatgtatttgttcaaatcaatcactgttatttgattttgtttgacttttatattattttgtatattgttcatcaattttggaagctcgatgattgtgacgcggtgttgtttgtgtttgtcatggttgggaattgatattggccctccaatattgctttgagcccctaaaattaatgcacagatactaaagtattttttatctcctttcctcttatactcactcttttccatttatggtgtttatagcacaagggaattgtcgaatcacaattttattattttataatttgtataacaaaacgaaatcaatttgattgtatcaaaaaaattataacataataaaatcatgattttattttaatatttgagttatttgtatctattaaataatgaaaaaaagaaatataacagaagtataataatttcattacacattatatactgaaatcatatttttattatacattctttgttaacctccacttgcataacaatattaatatttcgttggacattttttcaaacttagatatacaatggaaatatacttccgttgcactaatggggtgtaaaaaaatacacaaatatacaacgga

SEQ ID NO: 261 - DNA, 2629 bp, Glycine max
caagtgaagtcaagtcaaccatgtattggtcttctatgctctcctaacctaaaaagaggttggcttttgctagccgatttagtttattttccgagtactttttgtttaatataatttttttgcaaacaattttattagttctctcctggaaaggaaaatttgaccaacatattttcgtatagaaattatgatcaaatataaattattctttttaatttatttcttttctatatcaatttgtattatgcatactttaaattttataacaataataacattatggaacaatataacatatggattacacaaagaaaggaccacaaatgtttgcaacaagcttttcccaaatccccaccaaaaaccccaaatatgtcgttttctatgcacatacacacgtatagttttgcattttaattgaatcttacaatatgtgttacaatcctacaacccccctcccctgcgggattcagttacaatgctgaaaattcaatcttgacaaccttgctctgttgcacatataatataagcatagtcactagcagagacaagacatattttatcttgtggtataaatgtaagtgtttttaaggaaattaaagcattgaaatataactaatatcaaataaagcataatcatcccaatcctatataggaatagggaaagaaccaaaatgttaagagcccatttgattattctttttaaaaaaattctagttttttaaattaaaaattaaaaatcttgtttgagtgatgagttttataaaactgttttttaaaactacctcctattttagtttttaaagtaaaaaaaacaaaaacagctttaagatgttttgcttttcagttttcattttttgcattaaaatctacaaaacacacggataagcagagaatttacagttttcgttaatggcatttatttaaatatcttctctttatcatttctgaaacttttgttgtcttgcaagcatgtaagcgtttttcgggatatgattatcacaattgcccacaatgttatgttggtgccctgctaattatgttaatgggtggcttaattgcctattaatatgacaaatattgcttgagtgagtgaccctcactcagctgaagcttcttatattatcatacaaaagccaaacagtatataggtatatagagaggtgcagactaagcatcttatcaaatggctacagcagagaaaaagatacaaaaaggactgactattacaagacgtatactaatacataatacatatactaatttaacagtttgtttacactttaattattaacaaaatcttattattgtttggagtaaaacttattccaatattttgtgattaaattaaaaaataatttgtcgacatcacccctcaagcagattttcctagggaaccctttttatttaatcaaaattgaaattaaactaacatattaatttgtataagttcagaatgcaagcctttttgaaaagaatgcttgagtgagtaactttcacccagcagattacaacctttgttactttatataagaaagaaatggtggtattttttagtccttgcatttagtaaaagacaatgctactttaatctttaaaaatgtgtgattttaatccttgatggggactaaaacatatttaaatatatatctaagtttttcaataaatttaaaaatcataaaacaataatactatcaaatgagttttctgttttctatttttttagttatcaaaacatgttttcaaaacaattttaacaagtttttttatttactatttctaaaacagatttcaattcaaaattaccaaaacagatttcgttttaagtctcttctcataaataatttcttaaatttgttttacaaaacagattttgaagtcataaactgagaagaggggaaagagaaaaccctaaacagctaatttaatagaatgactttgatcttgatagccaaggcaaaacagccataagatttcgtatactgttagatacaaaattttatcattttctcatcagaaataaattacatattaccataaaattgacaactggtaatcagaaaaataaacagaataaagttggcagtatgtaggaaaataatttgtcgacatcacccctcaagcagattttcctagggaaccctttttatttaatcaaaattgaaattaaactaacatattaatttgtataagttcagaatgcaagcctttttgaaaagaatgcttgagtgagtaactttcacccagcagattacaacgtttgttactttatataagaaagaaatggtggtattttttagtccttgcatttagtaaaagacaatgctactttaatctttaaaaacgtgtgattttaatccttgatggggactaaaacatatttaaatatatatctaagtttttcaataaatttaaaaatcataaaacaataatactatctaatgagttttctgttttctatttttttagttatcaaaacatgttttcaaaacaattttaacaagtttttttatttactatttctaaaacagatttcaattcaaaattaccaaaacagatttcgttttaatccaatgaagttggtctcaatccttgatggtttaggacctgatgatgacagaagcgatgtagg

SEQ ID NO: 262 - DNA, 4097 bp, Glycine max
agctactagaagaaagaataagaaaattgaacataatggaaatagtttaatgaaggatcgtgtatgtacgttagtttaatattttgtatattggttaaacattatatttttaggagtttatttgctggaaatagttaatgtttgatttactgtttaaatgtttttttttttttgctatgaggaacacatagcatctgcaagttggacaaagaaagacaacttcgatatggattctttggtattctcaatatataggaaatgtttttaagtttatttttgaaaaagttatataatttattttttctgatattaattatgaatcccccacatactactcctgctaccacaacaaatccaagtgttgtccaaggtgcggatgttgttccccattgcaagacttgtcattacactatacaaaacatagtcaacgagcttctattttccttggctatggtcctcgtcctatttacaatcaatttcttcataatctatttatgcctcaacctaatcaggtgtgtattgaaatttttattagttatgaattgatgtcattgaagtcattatgtggttagtggcatgcacattgatatctaatttttttgttccatcagttttatactcttcttcagaatttcaatcacggattaaattgaaatggttctcctcacgtgcaattaacaatgaaagtcaaattggtaagacatgatttatttgttggaatttgattggtcttaaccattaatgcctttcataatctcattagtttgttatattgttttgttgtagatggtaatgaaggaaatccttaatactagtgcatgacaatcaacaacaccaacataaactaaattggtgaattgttttttggcaaagttgtgttattttttatttatttcaaaactcaacttaatggttcttcttgttttaaggtatttttggttaattacaaggatacaaaattatagaatcattctaacatcatatttatatttaacatgctttaaattttcatcttaaattatggtagtcaaatcttgttacatgatcaatattatttttcttaaggaaattactagtgtacatatgggttagtatccttagtgaatagagatataagtataatttgagttattattcgtaactagattttgacccgtgcactgcatagggtaaacaatatatttaagatttttttttaaattctatacaatatatagtttgttaaattttatctttataaatgaatcaaataatgtgtgcctgttaaatcttccaaattgaattaaataattctaggctaaacactcctaaaaatttcaagtttttgccacttccttgtaattttttatgagattagaggaaaagatgaaacaatagtgacttttggtgttttgagtatgcttgagaagataaaggaagaaagcaattaagtttattagtcacctcaaagaatcatctaacaaaattaccactaaaaactaataaaaatatgttttatttttacaaggaccaaattaatatgaaaaattgttaagaaaaaattaatacttttcaaattttactgggaccacaaacatattttaccctaaacaaaatatgtataatgatttttgtaaaaattgatttgtataaagaaattaatttaacccttaatgggattttaactaaattgttcattcttgtgacttatgtctatttctctatttatttcatacaaaacttggcatgaattttatagaaataattagtaacataaaaaagtagatattaattttattcataacttttgtgttagataaaataaaggataaaacatcatttgtgtctctaaaaatagtatcactttagttctaaaagatgtttttttaattaaaaaacctaaaattgctatatgtgttaatcattttagttcaaaaagcaaaatgttgtgtaacttaagtatttacttgtatttaaaaactaaagtgatacaaagtatcttatttcacattctaaagacttattttgatttttttttcgtttcaagatctaatgtgacaacattttacaattttagggacacaaatggtgtttcagtcataaaataatgtttatattttatatataattttttattttaatcgatttataataaaatttccggacaaaaggaaatttgaaataatctatcaaaggaaaaagataataaataattaacctaaaaaacattaattttgcatggaagaaattgtaatgagtacgtatttaattttatttttgttatgtaatgaaatatataaggttcctatggtagagttgcttacattggcatatctataaggttcctacttccatcccttcttccttactcttttgtgaagatgaatcatgtctaacatgctcatcactattttcatatttcaacttgatgtattcactgaagaagattttctctccatctaaatctacaaaaaatccaataaaaaagacaaaagacgtgacttaaatttgtatttcatgattttgaccttttaaactcaacttataattaaataaaataactcataagatatgaaacaatcaagaattaatcccatctatggtagaatgagctttaattatgtttgcatatgagattagaccttactacaataaaatcaaggatataaaaaaaagggaattaaattataacaccaagggttaattgcatgatttgcatcacaaaatccaagaaacactccactacttcggcaccaacatgctacgctccattccatatgcctctagcttcatcctctacgttgaaataataagaaagtattaaaaaaatcattaaatattttaaactctttttttgtgattttcatattgtatctagtgcatgcccatccaatgccattcaagtaattacaaagaaacataccgcaaacaaccaaatcaagttgacagttacaattaaagaacatagatgagagcttcaaaacagagctattacatggagtactttttgaaatttaggaaacaaacacacataaatgggagcttacactgagaaattccgatccaatcgaagctctgaaatatagaaagaaaatcagaatgagtggccatgtacattatgaatatcgatttcaaatttaggattgaaagtcaaaaaacaaatggttagagaaaagataaaggataactaaattctaaattaacgatgaacaaaattttcaccggaaagatcatgcttacctaatatgatcacaacagtgtagatcataatgcttcaaattaaaactgtaaactaggtacccacaatttatataattaaacagttttttaggaaataatagttaaacaacctttaaatgatacattcatatataatataggaccatttaatgaattttcctaataagaaatcaaacagtttgtaattttatttgtgcaaagcgtaaatcaaatgggtacaaaattgttttatgcaattctatagaataatatgattgaaaccaaaaaaacataaaacataaaacataattttatggtcttgtttatttctctcaaattctactcatagcaaagttcaattttgaatattaatataaaaccaaaaaagtaaagttttgattactaatgtaagaaagcataattattataatattgttctgacggggataaaatataatgaccttaggtgagaatacaaccttaacaccaacttcctatatcactttaaattagcttgattgtaagccaaataacatacaaaaataaaaagaaaaacatgagaaatcaaagaaacgatttgaacatataaattgtaacgttgtgttttcgtaattatttgttcaagtgatttaattaaattataagagaaattaaatttaagttaagtacttgaattaattaattaattaattgatgagttagtgatggtgagcatgtgttcaatgggtatcactgagttttggtgtgtttggacctagatgaatgagcttttgatttatgagagagataggtgtccttaatagaagccaaggtgaagatagagagaagtggaagggttaaaaatccctcataaaccctcgcattcaaaaatttctcacaaaagaaaacttcttatttca

SEQ ID NO: 263 - DNA, 6100 bp, Glycine max
gacaaaagaaatcattgtagactagtgtgttaataaggtaaacccactgacatcaagtcttcccagttatcatcactaacttatggtaacgtttttgtgtgtacctagttcaaatcctgaccacctacatcttagaaacttatagagtaatatatactttttttatggaatacttttaataaaagataacatagggaatcattatttttatgaaggaatatcatttaatcactctttggtgcggttaggggccagcctgaaacttcttaactttttagtggggtaactaaattggtctattggggaattagaggatagtataaaggtgtaatgtgattgtcctaatggatgatatattttcaaattgaaatgtgaatttttccctgaagctaagtacctctctctaaaatgtttaatttttggaattgaccagtgatggaaacattttgctggtgagtgaaagggaactaacatttcatcattacccatgttgactaagggcttcacaaaaagaaaagaaaaacatttaatttcttgttaatgattaaagtttaaggcaggctgttcatgtcaaagttggtgcagaggtatcatggtttgagtgtttatgcaataacaaaaaatgttaactttaaataaaaagagatagaaataataataatttgtatgtttttattatttagtaaatattaattctatattaaaaattaaaataaattacacttaacacccctcaagtttcattaaatttgcataaacactcacggtctttatctactccaatattaatcctctcgattatttaaaaatatacattgatattcatttatacactatattgatccacttagttatttaaaaatatacactaatatccttttaattgtttaaaaaacatcacatcagacttcagacttccttaaagcgagttcaatgtaaatgttaaaaaagtaaggaaagttcacgcaattttacaaaattgtcgagtttatgtaatttattttaaaaattttaattacactgaagtttatttgcagaatttattatatttttacttattttatgatatacaaatattttttaaatgctaaattaatgaactgaaaatattttaatgagaattttaataaaagaataaaatactatgagctaattaaataagttttaattgctttatttaactaattaattgactcaactgagttcttatttctaaccctttatacccgaatttaaagctatctctgctttaaagcttaaattatctttcttaacagttttggcaaataactaaaaaattatgcaaaaactgaaattgggtaaaagatccctccaggaaacaagcatggactcgggactcgggactcgggactcggtagtgagaagtaacgcctatgttgacccaaccgagtccatataatcttgcaaagtctattactaatattgtggtgggtttgttttatggataaattgttttatctcagaaatattagaggggaggggaaacatttacgccgctttttattaagaagtaatgaaataattaaatttaaatatattttattgttagagtcaataatctcaactttaagatggaggaagtagaaaatatttatttctgactcataaattactcttgatgagtaaaaatacaatagggtctccttattatcccctaccatactaccctcttaatgctcccttcacgtaggtttttcggataaaatataatcatggataaaataattatgacactgtaacaggttatagtgattttctttggcattgttttttggaactttgggttgttacatttgtatatactttggacacatttgtatttttttaaacaaactttaatcatgaggatatttcaataattattatatatatttagaaaaaaagcatgttaaacaaacatatattttaattatttctgaacatataaaaaatattttcaaatatttttaatagttaatcaaactcattttaataatatactcaaaaataatatttccatattttatttttaagattaaaaaatttatccgtcaaacaaacttaaagaaacaccagaaattattttatactagagcaaagattctcttatatgctttatactgtcgttaaaatttttacttaaacctgatttcttttgaaaaaaaaaagtaaaaaactattttctataatttataaaaatttaaaaattaaataaaaattactttttcaagaattaaatgactaattaaaattaaaataaccctatttttgagaaattaaaatcatatttaagtttttttaaaacgtaaaagggatttccaaaagttattttattagtcactgatgagtgatgacagaaaattcgacgttgcttataagtttttcgaaggaacaaaatacatattttataattttttgtgaatatataaatacatatttcatatattacaatgaaccagtattttatgaacattaggagaggacaaatgtaacccttcaaaacttcaggcatcttttattacatctaacatgaacatacaatctttattataatgtataaattaaatcttattaaattctagtcctatcctattcattttttttaacaaaacacagctaaatcttgatattttaaatttcaactttttttaccaatagtttgataaaattatatatcaaactagtgtagtttgaaaattatatttaagaggtaggtgattttgacatctttttaactggggtaaaacattacttatatatatcgattataattacaattaatattaaacatcaaaatcacctatgtaagtaatttttaaactacattaatttggtatataattttacgaaatcatataatttggtaaaaaaaaaaaaaagttctaaatttcaattcatttccggagatttcgcccgattacactagacttttaccatttggccagtttcttccattttaaaaataacattttaaattttttttttatagaatgattctcagtttatcatgtttctcaccgtctgaggtaactttggatttgaataatgaggattgactaaaccaattattgtaaattatttaactttacagtgcactaaaatcaatgtaaatagtttgttaaaataatatagctttcatttaaaagtaataaatctttttttaagaaaaagtaataaatcttttaagagttttaatttatcttaaattatttgttgcttagaaaaatataatatttaattttaaaattttatctttaatattttgtatctctatatactccattgcgtatgaagtgaaataaaaatataaattaagtaaagttgtaattttcttgtttgacccaccctatttgattcaagtaaaataaagcaatactaagagagttcaattgattaaataatgtgttaatatctaatgtgtttctaagttcaattcatacaaataaaaataataaaacaagaaccataaagttaaatagaattattaataaaaaaacacattgggctaaaatttaatatcattaattacgtttaaataatatcttgtcagctaatttaagtctttggtgagtaaaataataatatacttaaatgtaattatgtttgcctaaattaaatatatttaataacttaatatttatacaatatattaaatgaaaatatttgtggaataaatgaaggaataatgatagtggacattaaattacaaattcatgtcccttcataaatgaactactcgctcattcttctctaacaagtaagcgaataaactaatgatacataaaaaggacaaccataatatttcaattgatgaaaattagcttggaatagatgaaaatgaatacatatatgggagttgcaacaatcataaaatgtaagctagttactcacaaaaatatacagatcaaactttgacgcacgaaacttcatcttaattaggggaagtgaattgagaacctgagaacctcaaataatcagatgcgtgtgaaaaataacaaaagaaatatttttctttcatttttcctttcctcagcaaaccacatttgatcaaggacagcccctataaatggtctagcaatgagttcatgggtaaaattagaaagatagctatatgaaattaacaaagcacaagaaccatatacgttgcgaacaatccaacttaaattaacaaagaaggaatggatcctttattcttctttgtgaaccaaccaccaattaacaaggcatcgaatctactagcttttcttttgtttccttttaagagtgtatggatgaaagttcccgatcgagaacgagacatcgtaaatcagggatctatgctcccacacttatgtttattagttgtatgattcaatttatcaattacttacttttaaaagtaaaataatattaacaataaaaaaaaagtgtcttatgctagttgttgaaatcagaaagtagagatcaaagccttcataggccagccaaaacaatttcaaatcaagacagagtctatcaattagaaacaatttttaaaatcaacttgtaaagccttccaaagcctagattcgtagactataataatttcatataattgacaaattttaaagatgaaattatctatttgatttttttatcttttttttcagtttaatcctttatttattaaaaaatttaatttagtcaattattttatattttggtcacttattttgcttgtttagtttaatccttcgattcatttaagactcattaatcatttaagaataaaatttgttatgttaagaatgaagtggaggaaaaggggagaaaacttactaaacaaaaaaatcatttttagataattaatgacgttaattttaaatagattgaataatcaaattgaaaaaaaaaataagataaaagatcaaatagaactaaaaaaataagataaaagactaaataatttttttaaaaatataaaggactaaaaatgaacaaaaaaaataagataaaagaataaattgaacttttaaaataaataaaagttcaaactaaaccaaaaaaataaaataaaggactaaatagttcatttagccaattttaaatagttactttatctggattgaaatataaaaaaataaaaaaaaaacatgtgatggattaaaatataagcaactttaaactaactcttctatatttgatgatatatctctaaaatacccttcatttaattaaagttttattttcaacaactttctccttttttgttctaaagggtattttagaaaatgatttttttattgagattatcaatattaaattatgttaactaattttcttgatgaatgtgattcattatttttgcttattagttcaaaggaagtattttttttcacttcattaactaattagatgatatatgtaaagcttgtaaactatttatcacaaattcaattattttttactaataattcatgattaattaacagtgaggaaaatagtgtattttttattaaggcttgcataatcttttggtgcctataaaatataattttttttatttaagtcttttaaaaacatttgttttgattttagtcattcaaagatttttattttattttaatccttgcggtcaagtaataacatagttgtgaaacccggtatggtcattggctcggtcgaggtagtgggtcagtggtccaacctatgggtcagtaattagtctgatttgatccggtctatattaaaaaatttaaaattatttatgtatatatcatatataagtatataataacattatttgattaagaaaagtccatccataatttcatactccaaaatccaaaataaaaattgaagtattaaatttgataatacaagtgaagtgtattagtaataaagagagtgtaaatagcaactatctaaattaaaacacaagttcagttttcaataaacaaaatgagccagaagcctatttttccaataaacaaaaagtgcagataaactttctacactcattatttttttttaacgtgcacaacccagtctaagtttttaaaaacaaatcgggtcaccgggtttccacaaaactggttgggtttggccgagccatcctggccaccgggtcccggctgaacca

SEQ ID NO: 264 - DNA, 5903 bp, Glycine max
ctactctgacccttatctggcatgtccatccttcttggcgcagcatttaattcgtcgtcagaaatagctgaaggacacctcacttgtttctcttttggacgccactggtcttgtcatcgtcgaaggcgcccttgcacttgccggcagaaccttttccggcgacctctttgccttttcctttggccttgttcgtcatttctacagagaatgcaatgagaccaacgccaattgcatggtcagagttagagaaatggagagaggaagaagtgtgtgactagagtgtgtgtaactgtgaagaacgacgagtccaaaatgaattttactgtaaataatttgaggaaaaaagtgaccaacacatatcatgcggtgcatacaagaatcggccattggtcaacttgtgagaggaaaaaatcatttaactaataccaaataatcttaaaattaacaaaataatttaactaattaactcgtggaagaaccttcttccgttgactctggcggaagaagttcttccgcgtagttccacggaagatggttcttccgcagttcttcttccgttgacactcgcggaacatttcttccacgagtgtcaacggaagaaggttcgcaaaaaggctgaagggcatttttgccattttggaaatttgctgggtgcaccaacaatgctgctgggtgcccctagcaaatccctctctggaattgaaggataaagtcatgaacaacatagccgaagcaagtcgttcgttagagaaccttaataggtttgtcaagtggcttaaagaataaggattgacattttatgcatctgtattatttatgttagctgaaagaaatcagatcaaagttgatgcagtaagcttttcaagcgattaaaatgtctacaaggtgtccaaaaatgaagatatatatggccatgaaactgaaacaaaatttagtaagcttttcaagtgattgaaatgtttacaaggccactttctttgttttagtcgtctggatgctttaagacaaagacagataatgtaatctagtatcctttcttcttttcatttgatatatatagtcttgtatgacattgtattcaagttaagagtatctcttagtactttaattcttaaatatgtttttcttataaaaaaaatcacgaaaaatcattaagatgtaaatacttatttttatatatttaaagaaataccatagtcaatatcaaaactgatgcaaaacagataaaaaacattgctccaaactagtatatcattcttggattccaaggcacatctcaattacacagcctactctgagcattatttcacttttttctgcaattaacctcacagtgactttacaaaatctagttaactaacattagttaatggagtccagtggcatcaattgattcatgtggccaaacctactcaacccagtaagtgggatatagtagcagagatgttcaatttctatctactgaacctactttgcaagtaagtaacagagaggtttcctttctatctctgcctctcacatacctaactaatatatggaatatgttgtatcagttatttctcaaaactttaaataaccagtgtttgaaatgaattaacttaactgtgctgaatatgcagaaataaaacttggggtttgattgtaagacttttttttttgccaagggtactgttgcttacttgagaccatttatgttgttaaatagataacacctctatgcagcagaaaagagtacaacaaagccaatggaagaggtttatattcaggtcaggtgtagcacaggttaaagttcacatacagtttctgatagtacattgggaacgtaccttggatctgtaaaggcagttttaattttagtttgaataagttaattgataagaatatgttattctgccgttagtgaaatagttagtttcagattttattgtttagttaatagaagctcccaaaatcacaaacatgatttctattcagttgtaatttttttatacggctgaaattacaaacactggaaagaagaaaaacaaaacacaagctatctactccttaaaaaataactactccaaagcgcatcagccaaagaaggcttcattaagcctggtgcacagaatgtagttgtctctgctacatcaggcaaagaacatatgaagatggaggtgtaacttcaactagctattttctcattaccctcttacacattagaaatttgtgcatataaatttttgttcaaattaatggtaaattggttactagggtcatgatgacaaaataattgaacatctatagttattataaaatgctaatattgtactgtgacatgcgactcttttacaagggatgctatcagaaacctcaaataaagcatagacatacgactctttttgcatgacttattacttggcattaaccgtttcacactgttttgctcatgctttcaataatgaaactcatgtcattacaaactcacatgttgaattattcattcatatcttataaatctgaatttttctttgtatagttttgaactcagttggacaaagcaaccttgctgggtgacatgattatacatttgaaagagctgaaaacaaatgcagcacaagctagtgaaggcctaatgataccaaagaacaatgataaaataagagtcgaagaaagaggatttctacattcagttctttatctataagagatttcttataagaacttttctttttaaatgtgtaatttaaatctccatatgcatagcatatatctaaatatgatgagggagtgagtgagattagcaaatagcaatttcacttgttagagaagctgtacattctgaaaatcatgtgaatctggttgtacatgtatcagaagcataatagcaactttactcaggttatgcgcacttgctgttgttgagtcattcagcattgctactcaggattactagaattgaaatccaatacaagctcatgtgtactgtgattcaaactcatgtttttttgcaattaaatgtcatgtttctctctatttcttcttttatttttgtgttgtctcccaagttttctttaccttatacaaagagtgaaatcatatcagtgctgcctgaagatcaattaaattaaggagcccgtcagatacataataaattggttttagataggatatgattgaggtagaatgaacaaatatgcatcaagaaaaaaatacgccaccaaatatgcatcaaggctgcactctcctacaccaaacaagtacatatgatatgttaatcccaaaatataagccacaaacacttgccaatatatacaaataaattagctatattctacagcaaaacatgctgtcatgcttccatgtacccttttcaattttgttccgctgcattggaatacttcatttatattgaaacagaataataaagtctgcctccatatttcataaatttattgctaaaagcagaaatgagagcatattcagtatatcaatcctatttgtaagatgcagaattgaacatcaagggatagcctacgaaaatgagttatagatgcttgtacaaggaccctaaaattgatgtttctaaacagataaattctgttacattcaaatatacataaccttggcagagaaaaactaaaaagttaaagattaattcctttgcccacatgtggtgcagaatatgaaatattctgcagacttcctgacagtcagcagttcagaatatgaaacttagaaaaaaatgattattggaaaatgaactaaaaacgaaatctcccactaatagcctatctaaataataaatatcatcctcaattgctccttcatcgccttatctaataacctctagacataattcattctttgttggtccttgaacttccaaagaaacttctgatattcagggtttttagcaaactttaaagccaagtcaatttcttggggcttcactaaatcccagtttttaaaccaattctttaaaatctctttttgaaggatctagctgtgaaagatctggcattttggccaccatttttccaaaattagttatcaccgcatccattttattatcgaaactgtcaataaatctagtagctaatgttggcatgagtcaaggagataatatttaaattttcgttatttttttttcttgtaataaggatccctagaattattctcatgtgcagttactataattactttaattagaactgcatatttatatactttctagtaataagcataatgtacaagaacagaaaacatttttctgtatcttggtatcagaaagaattacggtcaattttttctcctttcctaaaaccctagactcctcaaaaccaaataagctgtaatggcttaagaagcaaagattgtacctgtctcaagttagaatgttagctctgagtcatccaatatcaacatcatacccttaattgaacgacagaaactttaatgtatggtcaaagatgatgaaggttcatgctgcgtgcttgaataaacttggccacttgaatggaaaaaactgtgaaagtcggagaagacgatcctagttattccaaatgggtcatcgaagatgcggttgcacagggatggttgtcgaaaaccatggaacctcatcttattggtatgtttattgagttaccaactgctcgagacatttgggatagtattacgttacccaaatgttctatgacggagaagatgaagcccaacattatgaactgtgttgtaatacaacccagattcaacaaaatggataagcgatgcccaagtagaatggagtgtgtgcagcagatgtaaaaagctgtatggacgatcttaacaaggatcgagtatttaattttctcaacgggcttgaccaacagttcaatccaatttgaaagtgacattctttgaaagaaaccgctcccgagacttgaagaatgctgccatattatcctctgtgaatttcaggggcaagaaactatgcttggaaggaaggattttgtagtagaataatccatgcaatggtttcaaaaactgcctcagggatgcgacctcgttctttgcgagaccttgatgaagccaagaaagacaaaatccgatgcagtcattgcaatgcgactcgacataaaagggaaacttgctttgaacttcacggctatcccgaatggttcttggagaagaggaggcaaatgagagctaaaggcaagcgttcaggaccagcaaaactcattgattatgtagctggaattgctgctgtagcaacaagtcaaggtagttctgtaaattcctccaaagttcaagacaccaatttgttgtttttctcaaccaggttgatgtgactgagccaactcataattcaggtattaaaaatctataataataataataataaataagtacaaataagtttgtgtacttagatgtgttattaaagaaacaaattttttcttttcaatggtgttaaaattctacgtatatccacacatcgagaatcttctttctactttttagtttttaaactagacttgaacttttccaagttgtgttagtatattttgtcttagtggatgtttctatttatgatgttaaaaagagatgaatttgagcattttcattgactagtattttcatggtggtcattagagttcatatgctttagataattgcatcgccgctccacccacgagacacatcgcttgaacccaccaccaggaagactttgatacaagggatccaccgtcgtcatcttactcgttcaagctgatcaccaaattgaagcatcaaccatgataccaattattggggaaaaatacactcatatctttattacttaaaagtcacacaaccaagaacaagaggcaacatcataagcgaaatagaaaaaagatcacaaatttgtttaacgtggtttgggccctcacccttacatccac

SEQ ID NO: 265 - DNA, 3102 bp, Glycine max
cgaagctttgctataaatgatatgaatctactaacggattgtcttaaaaacatgtataagatagaaagatgaacttgatcctaaccccgacctacaagtagaaccaaagttataaaaaaagtgtgatcctaatctcaatctgtcagtagaaccaacactataaacttctttaatccaagaacaaagggaaaactctcgatagaaaaacactccatttgattaatctaaaaattcaaccttggaagcttacaagagactcctatttataggctattccaggcaacccttaaaacaaaagaaataaagtaccactaacaatccccgtaagtattaattgtccactatcatgtacttccaacttaccattacaatggctcattaagttccaccaaccatcataatgacttaggaagttcaaaaacactaaaaattgacctagaaaatatgaaaagacatttgaacttattcccccaaaataaattaccaaaattatattaaaaatagggagaatgaggttgagtaactcttcaacctgaatgctaaggaattcactcaaataaactccagtccacaaatgcaacttgagtcttaagtgttgggctgagtttgctctccaaattattgtcttcaagtttgctgaaataatcttcaaattgtagatatgagacaattcttagattgatctttaatttaactaaaccttctttagcttgtacctccatgattaagctttagaaaatcttttggctttttttagcttctgcgtttgtcaatgagccttccatccattgtaaaggatatttggaccttgacaggttcgtatcaccattacaatccttttacatatatatgaaaaagatattaaaattaaaaaatattataaagaaaaatgtattacaaaaaccgatttttaagttaatatttacttaattttcttttcttataatagtggaacatatagctagttttacgcataaaattaataataatatttttaatttattaaataattatttattagaaattagatatttaaatagttatgtaaaaaaaaattattctcttttgatacacttttagattcgtccttcacagaatagacacctaatcatcactttaaatataatatcgaagcattttttgcataagtaatattgaaatcgaagagttttacttctatatatgtttacatgcaaaaatagtccaatgacagagaagacaaatttcctaaaaactcatgtttcactaaatgagatgacaaaatagtgaatttcaatgacctaaccgtctatgtcaaacttcattttgatatgctacatcattacaagcctttacaaaagaccaggaagggtaaattgggtcggaaacaatttgcccacttcaggccctctcatggtcaccttcccctactattgatcttgcaagacaagcaacttgagaaaaatgcacataacaagtgtgctacaattaattgtccaataaggttaaacattttgcacataacaagtgtgccacaattaattgtccaataaggttaaacatagttgataaaccgttaagtttttttagtatgttaataagagtttaattttttggtccgtgtgtatgaaaaaaaactattagaagaaaaaaaatccattttaataatttttatctgagagttaatctcatgacttttgtttatgaagatattttattttaaaaaaataaataaataattgtctaataaaaattattttagaagcaaagagtaaattgttatctccaacagaaacaattagaagtgtattatctttagcaatttgaatgtgttgtgccctagtaagattgaacattaatttgtaaaaaaaaaaaaacgcagtagtcatatgaaccgaatccctaaaagagcaaatcatggttgagaaatgtaatttggcgttaccctaattaaacttctaaggctgaaagcgttgatattatcatctgcaagtcaaaacaatattgacgactgtggaagatgctgaggagggtactaacccattgctcttgaaggagaaggatgaacatgtggggatgaaaggcctgcacttgtcactattcaggtattgtaggacactctttaatattatgactatgatgcatggtattataaacgttttctcatagtgtgtacactaataattcattttttattaatgaatttattatacggtgggttataattgaataattgaatgattatatcaatgcataatccctcttctcttatataatatacagtgtaaaaacacatctgataatttttttaaactaagttaaaatagaaatccaatcatgattagaataataatcagaacaatgcttttatatttatattgtgagataaacattccaaattaatagatctacacatcaattacgaaaagttctaacacacttttttttttacattaagacttttacaaagtatttcatggaaaagtgatttttcaacgacatgcatgcccactagggtaatgtgttttaattaaaactgtagattgagattacaacctagctagtttagaacgtaattctcaatctcatagtaaccctctcataagccacaaaacatgcacccgattcctatttaactttagtagagaaagaccctacaaagatggttacatctgaatccagcctaatacttccaagttggtctcacttctgacaggtcaaaagaccaaaggaaagggatatggtacgggacacgttgactttgcgcctcagagtcatgtacttgcaagctaattactataaagttctgaatctcatagaaacaaacaccaaattgaagattttgttttgtcccgtagactttctgccactgcccttattatttcccacgaacctgactagtagtagtgatcatggagtgagtgcatggaaatttagataagtcaatctccaacaccaatcataatatagcacatgtgatgaactggtcaacctcatctctataggattggaatatgtaattcagctaatgaatggttaatttccaagagagacttcccttgtccatacgtgaattttgtgtgatagctaatgcaaacattcagttaatttgaacaaagtttg

SEQ ID NO: 266 - DNA, 4000 bp, Glycine max
gctgccaatttagtaaatttagagtgaaaatagaaaataaactcatggacaagaaacagatctttaaaaacaaattactcttttgaaacaattgcttttttaaaaattctattggctaataaaaaaaataaacaattatttcttcaaaataaattgggtcaagcatgtaacaccaataattgtaaaaaacaaagaaaagaaatcataaattagagtttgtttaatctatatcaaatattataactaatgaatgaaaaaaaatacccatagaaacaaattattttttgaaatatttaccatttttcaatttcttattgctaatagaaaaaaataaggtaataattatttcgtcaaaataaattcaaccaagcagatgtaatacgaataaggaacaaagaaaactaccatataaatcagagtttattttatgtatatcaatattaaaactaataaatgaaagcaaacccatataaacaatttttttttgaaatatttaccgtttttgaaattctcttggctaataaaaaaataaggtgacgcttatttcttcaaaataaattgaaacaaacatgtaatacgaataagtataaggaacacagaaatcaaagcttattttatgtatatatcaatattaagactaataaacgaaacaattatgaatgataatatgggctatatagaacctggtaggattgagggaatcgaaattggaaggagacaagggagaaagtcaagtggggtacttgaagacttttgtagaacagaatcatgaaaggggtgtgtaccccacgagtagaccaccagaagaggacgatatggaaaaatgggtacgttattgtttaattgaagggtggtatatagtgatggttttttgtgtgttatgtatatataacaataataacaatagttatgtgtggcagtgtgggggcgctgaggaaggttgggcttgacttgtgggtggtcacagaagaggacagagagagagccaaagggtgattaaatttccacctcacttgtgatgatcaccaccttttattaatgtgtgtcacaggctaccaacgctctcgtggttactttgccgccttggttcatgaggtaacgctgaacaagggtttacacttttttttttatctaaactttaaactttgaactttcaataagggtcacattcaggatctatagtgcagttttctttctgaactttttagttgggaaaaaaaagaaaagaaactcttttttccgagaatttgttggtgcatgactcacatggccacatgaaaattttccccaaaatagacaggcattcatggatttttacgtgagtagtaggtgtttgtaagtttcacagctatatccttaaaatcaccccgcgttagaaaatggacctttcatgcaagtttcaaaactattacgatttcgaaaactcatgaattttgaataattgatctattgaaacaaaggcttagttctttgatctttgaatgaatatttgtacaagtatacctgcgagactagtttctctttttggggtgataactagcgaaacgttaactatcctcataatggcaactttaaaatgcaattacaactatggtcatgatgcttagagttggagtgttgctaggtgcactagttttattatttgtgcactcaatattttttgttaattttaaaattatcctgcatcgaaggtatacgagttcgtggttgatctgtatatttaaattaaacttacggattacatgatccgatccgtataaaatatatgaattatgtgatccatatgacttgtacggatcaacttgagtgaagggcattttcgcccattcacttaaaatgataggtgcaccagcaataatctattcggctttggttcaaggcccgctttgtgatttttagtgtgcagacagaattgtggtaatcatattctttggtaatcaattgaattttatccttcttacttttttatgactgaataattaatagtttattcataatcaagatttttaaatatcatatttaagagacatcaaaagaaaatttatttaatttaccttaaatggtttcaaataaaattttaataataatttcaaatttgataaattagccctttttagtgtatgcaatagtaacaacaataattaatattattattttgtaagttttacatttgcactaacaaaaacaattaaatgttttcaaataattcaatatgttaaaatttgattttgattcattgttgaagtttgaatcataaccattgtgatttttggttcaacaactttgattacataattatgttaacattaacattaatggaaggaaataacatgttatactcttctcttttatgttgatcattgtatctaatttgtcgcttcttttcctaaaaaattatgaataaattttgttgatgagtgaaaatatcatcattaattgactaattgctagtattgtttccttaaataaatctattgaaaattattttattttttataacaattttttatgtaattatatatatatatatatatgtatatatatgatgcccctctaaaaatgatgctctcgacgttcactctcactactgttttgctccacatgggttagggccaaattagcccatagggcccaaaagcatttagggaaagggccaacccatgggctgatcaacttttaaaaattaaaatttagaaaattaagacaattttttcttgtgatatagtacttgttgatgtgccttaaatctaaataatttaatctatattttttaatactttcttgccaaagtcaagttgaaatactctggcggaggccgagttgtagatattgtaagttacatcgagttgaaaatgctttaatcaagataaaattaaagatattctagttgagaccaaaagttgaaaatattctccctagctgaagtcaattgaaagatgctttgattgaggctagtcgaaaaaagtcttggtcaaggtcaattgaaaaatgccttagtcgatatttacttacctgagttcaaccaaaagaaaccttgatcgaggtcagcttaaaaaagcactagccaagtttggctgaattaataggccctagtcgaggttagtcggaatgggaaagaagctcacatttaaaaaccacaatatcctgactacaatttgaaaattacatgtgctagaattatcggaaaaagaattgattaaaaggaacaagaaaaaattgtgtcgtgataatattcactgcactgaaagcaaattctgatggacctctttggtgcaatccaatacctagtttgctccccaaggtttacacaatgttgtgtctgaattcgtgcactcgaggccaaacacgttgcagtctcacaaacaatgtctagtagaacacaaaataggaaggaaaattagaggatacaaaacatcgcataaaaataaattggcctttagggctcctccaacatacattattaataaaaacctacaacaactcaataaaacataagaaaattactaaaaactatgtaatttatgtaatttactctccttctgttcgaccctcttatactcaatagtgaaacattaatcccacctaaacgactcgagtgactcttcatttctacattgcttcagataatttagttctgcggtttcttcataaaaggcccatccttccacatctatagcaatttatagtgtttcacttcgatatacttcctccttattgtcttggacagatgtctttttcctttgaataagagagcatattcaacctcttgtgtagatgatgttgatcgatgattgttgaaaaaggcactactacaaaatggagcttctacatcggttaaaataaggtttctacgtcgggcccaccaccgtctttgttccaggtgacgttgtatgtcgacaacaactacgacggtcaccctacaaccgtctttgtaatgtgagaagacaacgtcagtgtgcagtcaacaacagttgtcatatacatcaaatcaacgacgcac

SEQ ID NO: 267 - DNA, 3805 bp, Glycine max
tacgtctaaagatgaatatgtaagaaaacatatatcaaatttttgcaaagcaatttagacgatgactacagatcttgtaagacaaacaaagattttcaaagacaaaaatcaaatttgaaccctaagtcaatttaaagcacaaaagagaaaataaacaagataagacacatgaaattatattggttcatctaaactactgagactatgttcaattcttgacaaaccactaagtactactaacttcaactacttataagtatttatcagtctcactattaggtccttaactcaagctctataccaaacttgttacaatcaatattttttgtcctactaagtcactgctagctctaacatgaatcaaataatttgtttgtttgattgtacaatgactaatactcaattgtcttatagacaatagacaatcttagcccatagtcttttctctcaaaataatcaaagtgttttgagagaaattctaaattttataaaaatttacacaaagagctttttatataaaaaatttgaataagagcctttaagttggttcttcatgtctccaaaatttttagtatttagagaattcctcccatcaagtatcaattatatgtatacaaatacatttcttctattaaatttgcatctaaagaatttgactattgggaacatttaatgctaattacagattttccagaggtgcacatgtctcatcaatcattgcttgccgccacttaatgcttcacctggggagggagggaaggaagcggatgtgcagtgttaatatcgtttgatggcatttgagaaccactggcaaaaatatttttgtcgccagggaccatgggtccaccgggaaacacagtttttgagaagcctttttcaggctataccatatcaaaatagaaaaataacatagacacattggaccgaaaccgtatgtctaaatgataacacgacgctggtttatataaattgattatattgattacacgtaattagagaatattcaattcccctaaatcagatatcgaatcctatcaattattatacattaaatgaataatatttattcatgattctcaacattatataattcaaatttatgaaaaacaaaaatggataaattgttgagagaacaattcaaaatcctaattttaaattaatgtaggatgcatgatgtcatttaaatttaaggttaaattagttatttaatttctataattttacaattcttatctttttggttccaatagtttgaaagtgatttttttagttctataatttacattttaattcttttttagtctggtttttgtagtctttgtattttaattctcttttagtccctatagtttgaaagtagtttttttagttcatatagtttatattttaattccattttagtccttatcatcaaaatatgagtaatattatcaattacaattaactacaaaaatattagcaagtaattcgtaactaatttatcgtaagataatttataataaaaaaataattgataatttataattaatttgtaactaattatttttatatttttttgtagtaaggactaaaaggtaattaaaatacaaattatagagactaaaaatatcactttcaaactataggaactaaaagagaattaaaatacaaactataaggactaaaaagaacactattaaactacaggaactaaaaaagaattaaaatataaattatatgaactaaaaaaaccactttcaaactatagggactaaagactttctttagatttaaacattttatttttattttaggaaattgttttccctttcaatattaagatgtgaagtatataagtacaagtttttaagaaagatcacccaaccgagagagatctagaaaacttgtaattagaggtttattaagtttatccgtaaaacttttaatgtgagggttttctcaattttgttagaaaaaaaatcttataatggatatttattgaataagcacttcatggaatccaacccatgctagggaacactagtgcgaaaatgagattttagaacagttgtaaaagaactgttccaaacaaaagaaagtgggatttttgaaaataaaaacattgaatttacgacagttgtcagtgtttggaggtatgtgttgggttgagtttggtttctgtgaggatttgaagccacattactgaaactccacaaattgtttacaccagcttgcctatttgtagtacgacactattaaatttaattgttgtacagtgaactgtattttttaatttgcactaacagtgctagaatgtgaaactgtgttgttggttgaaggtgcgttgatatacaatagaagaaatatgaattattagttgtggaatacacacaggattaacttttccatcaatgatttgcaaaaaatagaagcaaaagttatggattccaagcattaattcatttgttgggctctgtaatgcatgtaacatgtattatgtatcacttttatattacaagcattcatgcactgttctttcccctgtttgggtttgctaagagggaattaggaggaacctaattactttattgactaggatatgcaccagctttgcagttttgctttcagcttaatataaataaagactaaagaccaagacctctcgtgataatgaatgagtttttttgggggttcatacatgattggctttattgtattgcatctctaacagaattttttattacttgatgatggtaatataattgaagtgtctgctatacagtttttgtgcatctgatctaaagtattctttttggtggggttaagattctgatacagttaaatcaagtctaattttagtaaaggtgattaaaatatgttgttagctacccttttcaagtttcaatctttaaagagtatgtgcttgtagagaaccgaggactacctcatacttgtctcttggttgtgtttattgcattatttttaaatttcaaggaaacatattatgtttttgtgaatttgtttggtattattgttatctgttcatagggagacaaataaataaaatgtattatataaaaaaattaaacattttagatcaattttagcaaataattgttttaaaaagtcattttttataatgattaaaaaaataattattctaaaaagagaattttaagaatggttaagtccaacaattattctaaaaagtcacttttaagaatggttatgtctaattgttatgaaaagtcattttttagaacggttatgtcaatagtcattctaaaatgacaatgtttttaaaacaatcataatatgaacttttccaaaaaggactttttagaatattttatattatgaccgtttcaaaacctaaatcctaaaatgtgactttttagaccgtttcaaaaatgattctaaaatgttatcactttttattatatgactttctacgacgtttgtacaaccattcttaaaagtttcttttgtagtactggaagtaacactttaataataacaactattgtgtcaacaacagtgttatttataaagtgattcccaatataattactcaagaggacaaccttttattgactaagaacactgatcttgaagagactaacgctcttgttttttctcttaataacgagaagagtgcacccgatcctcatggcttcaatggtttcttctatcaacatttttgggacattattgaagaagatgtgcaaagagttattctttaattttctcaaacaggatggctgcttcctagcttgaactccaatcttgctattctcattccaaaagaagaaggtgctgatagagt

SEQ ID NO: 268 - DNA, 4300 bp, Glycine max
cgtcgtaaaaaatccctttttttagtagtgaaactactgcatcttttttggccaacccttctttcataattataccaaactcacatcaccatagccacgccatttcaaccacaatgcctcaaacactgacactaccaccaatctcgaccctccaaacaccacgtgcaccaccgtagccacatcgttccaatctgtgatcacaacaccaacacttcgtgaagtcgtgaaccactacgacttcccccttgcttttctcactaaggccatgttttcttctcacgcgcaaggacaccattgcaacaccctctctacacaacaatctcactgtcatgcacactaacaaataaacttcattcagccagcacccaccgccctagaatctggcatgaaatggaaccaataaaaattgtgcgatgtgtgtcataattttttgcttgttattttatacttcctcgagcatgcatgacatgaacctactggtattgtttggtttacattatggtcactagcagagatacatgtgttgtcatgtttgtgtccttatttctattgcgacaacaaaattttattgcatcatttttaaatagaattttattgtcgcgcctttggtccactggtcttcaaccatcacatgttcatagtctcaactaatatttatatgacatttaaattttttaatttataaaaaacaattgattgattatgttatatgtttattcctttatcaaagaagaaaaataatgaacaacaaaatcagatcttcaaataccagcatccaaaaagaaagaaaaaaaactctaatatcataaacaataacatcaacatatgagtccctaacaatgacggttgttttaaaaagaaaatgcatttaagagaaagggcaattacttatattttagagagagcaatgcctttcaatatcgaacaaggactgtagatgagtatagaaagcaacatctgaatgttgaatcctcttcccaattcaactatatatgtccatatagaaaaacatgtagatgaatatgcagatgcaaataaatagaaatttcagtaactagcttttgtttttatggaaaattcagtgatagcagaagaagaaaaaatgataaagtgagagcagaagaaatagaaattttgctacccggtccgttgcagcctctcctccatacaactagtaatctgtcactcaccacctgtccctaaaaagttgatatctttggaagagagtggagaatatcaaacctcaaaggataatatagtacaaattagaagttacagggagaagaagagagaaagaatgaatgagtcgcggtatattcaaatagaaaacggaaaaagtgtgcccgttactctgcttttggaagagaaaaatttgaagcacgacttggagagtgagtgggtagttaaatataaaaggaaaatggtctgcctgttactctgttcgcggaagagagaaaacttgaagcactaattggaacttggaagagagtgggcacttatctttgtattaatttaatgttatattttcattttttccaattttatcctttaattggtgttcatattgcggttgaagttgaaagaggataggagaatgatgtataattaaaggataaaaatgtcttaaaaaatatgtacattgtattatatattgttatacattatgttactttttcttgacttcttttcctcacgtacgtgcatgtgatatccttatgatgttcaccctttttcctttttatattgtttttcttttgttatttttattatgttaaatatcaaataaaaaactttttttattactaatatccatgtgtgcaaaaaaaaaagaagaaaagaaaaatctaaaaaagtggaataaaagtttattttttaaaaaaatgatgttacattttctaataataataataatagtaatagtaatataataagaagttttttgcaatagtcgctttgatgtaattttaatttggttattatgaaagctatttaaaagttaatgataatcactgtaaatgtatttttgacttgattattatcaaaacttttaaaataaataaataaataaaaagataaaaatgactaaaatatcaatacaaaaatattttctacaaaagaattatgtaaaactctgatttttcattgcacctaacgatacgtaggaataaaggatcattcccattgagcaaaaataagtcaaagaagataaattaaaaaacaaaaatacattcctctttcatagtaatacatttccttttaataaaaatctcttgttaaaatataaataaataaaatataaaatatatgtgtttgttttgaggggtaaagtaaataattttaagttactcaaattttatgcatttaattagaggtagtcgtctttatgacatacgttgtaggatgctaatatatttcctactagtaatggactcttaaactcaaaatctagttctaaagaccatttttttcaaaaaagattttatcaatgttttccttaataaacattgatggcaactcctttgatttttaatctattatgagatgatggtttgttgtgctcatatgtatactaatgttgacatatgtaaaaatcttgttttgagtgtgaatagtaagttttagagtgtttgggttgagatgagtgggccttaagtgatgaaaacaaagtaggtgaactaaagaagtgtgaatagaaataagcagaagagttttgttctcaatttgattgaatcaaaactgaatcacaacataaaatcctctcatttcactattttagcttcttcctctccaagacaacccacttttagagagtgtgagacctcaataaataaaatataaaatatgtgtttgttttgaggtgtaaagtaaataattttaagttactcaaattttatgcatttaattagagttagtcgtctttatgacatgcaccgtaggatgctaatatctttcctactaataatggactcttaaactcaaaatctggttccaaagaccatttttttctgaaaagattttatcaatgttttccttaataaacattgatggcaactcctttgatttttaatctattatgagatgatggtttgttgtgctcatatgtatactaatgttgacatatgtgaaaatcttgtttttagtgtgaatagtaagttttagaatgtttgggttgagatgagtgggccttaagtgatgaaaacaaagtaggtgaactgaagaagtgtgaatagaaataagtagaagagttttattctcaattttattgaatcaaaactgaatcacaacataaaatcctctcatttcactcttttagcttcttcctctccaagacaacccactgttagagagtgtgagacctcgaatccctagcacaaacaagattgtgactaagcttctttttcaaatttggactgattttagaggtaaaagaccctcatctttcttctcacatcctctattttcttttcctccataggtaccttcagaagtttcataaaggtgttttttttcaaggttttgatgtgttttatgttggtttttgggatttgggtggtatggatgatgtagaactaagtaaaggtgagggaatgcttgcatcttggacccaaagttccatcctttctacttttcttcatctcaaagcaagtttcttgagtttgataggtaaggaaagctttaaactaacttcaatcatatgtttgatgtgttggatcgttgttttagattattaatggtgtactaattcgatgatcatatttggaaacaaaagatttgagttggatatggatttggggtgctaagaaggccctcaacctagtgctagaggttgttagtgatggctaacaatgctaagaatggatgagtgagtgaatccctaaataacttaaggttgatacaagtcttacaagaggtaagccactatccatgttcatccattttcaataaaatcacacttcctccatgagattaatttgaaccttgtcaaatggtcaaagcgtgactatgttaagggatgtacttgggttaatcgctcaaggtgaaatctacatgagagtaaaaagtcaggatgacatgacataattgttaggcatgtacattaataattgtgacttaagaatgacgtgatacttggtgagttgtataactacattggtataaaaaatgtgaaggattttctatatctttcttaaaattgtgatcttatattatttcaattatatgatatttcttttaaaatgagtttacccttacgttttttgttaaactgtgataatcgtgtcatttgacatggaagaaaatt

SEQ ID NO: 269 - DNA, 5401 bp, Glycine max
tagatgtttttttgaggtcccgagtctcattttaccctgactgtttttcagtgtactctgctggagcacttgaatgtgtccccttcccaactccacccaaacatttaggcgatggtgctagcctttgaaattctgtgccttttcttcaacatcctgcttagtgtgtcggtcttcttattctactttcaaatgaaacataatggcaagattgaatgggtcttcttgaataacgtgtccaaaaaaatgtttgagtttgattcaaacatctttcgccgttttaaggagtgtttctttaaagtcttgattattggtgtcgtggctgatggtatgccactgatgttcaacagggacaaggagccttgcttctctttctactagcagtctaattccactaggttcaagttgtatgatgaggatttgctaacccttgtggagaggatcgtcaaagcgattttggagcagctatcggcctcactggacgcaaggatttgctacaccccattgccacatcatatagtcacactttgtgcatgtccttcatgctttacatgccttatgatatctaagcacacttagtggagaatcttggacttgatcttggattagtgggatgaaccataactaaaattcactaatcataattagtgaaattttggctccaaaatttggctccacaaattcaatttcaaatccaagtgaaatttgaatagaaattcaaatttccctccaattttgtgtgacacttaggctataaatagaggtcatgtgtgtgcatttttttcaactttgatgatttgaaaattaaacttcagatttcagagctctcttagagcacaaaaattcatgctcttctctccctttcccttcattcatctccttcttcctccaagctcttatccatgacctcctatggtggtgagcttcttctagactcatcttctccttgaagtggcgtctcctctctctcttccttctccattccgctgccattcatcttccaagaagcaaaggaatccattgatgaagaagatcctaagcctacaagctccaatggagcttacatcacctatttgttggggaaccggtctattgaggaccaagcgtccgcactcctatagcagagttgacgtcaaaggttgacacgtgtctcaaagtgtcatgttggatgccacgtctattttgtctgtcctggacaatacacatgtattattattataagctaaaggcacaataatatttaaaattgttgcaaagataattatgagtttagatgtttttttttttaattttcataatttggtatgttaagcttatttaaatttaaatagcaatatttaagaagaatagaggaacaaaatatgatataatttttatgattaaggaagtaaggagtattagataaaaaaatatttaaagcttttaattttttttttacattttaaacctttttatctaatttttttagattattataattgagtatttggccaccttacgacacgagctgacgatagtcctgcaccacttgtgtctgcatttcaaaaggcatccctttcttttaagaggattcgtgacatgcgaagtcttggtaaggttctttgctttgcatcgaattaaaccacatgctctattgcttgtgtgggtccataccaattccttcaagtttcattcttgctaacatactccctagacgggatacataacacgttagctacaatattgcatgcgtcgatacacacaacacttagtatccattgtttacgactaggactactcgggtatctaatctcattcactcccctaactatcgtctctcaatgtcagtgtcaatcaacatagtactttattgttggtgttcttttttatatctatgcatttcactgtcccactggaaattccctttgcctttatcgtacttcaacttggtagtttccaccatctatctagggtaagttctattagcctattaggtagggatatatttaattgaaagtcttcaaataattcaatagtaagaaataatttaattaggcctaattgcatattttaccccaactttttaatgattggagaattttattatcaaaaaattaatttgatgcattttacctcaattttaaagaaatttgtgaattttatcctctatcattttactcataatataattacactttttagtcccattttttttttatttttttgactaattttgcacccaacttttaattgttttttagaaaattttacttctagttttttttataaaaaattttggcaaattttactctcaacgtttgtgcttattaataaataaatgaaagaaagtataattcacaagttttttaaaagttgggggtaaaatacattaaattaatttgttgggggtaaaattcacaaaaattaaaaaattaggagaaatatataatatatacaactatattcaatacttgaaaggaaaattttatcaccgataataacattgtgagtctcaaatagatttgcctccaatggaaatgtttggaaaactcttttaagaattttcaattaaatctctatatttgatgaaattctaacatatgtttgaaaatggtgaatgaagaaaggaattaggagagagaaggtatctaatgtaaccgagcaaacgtgggaactcggcattgtggaagtgaggatctccaaaaaaaaacctaccctttcttttgaccactctctatctctaaagcctcactcttgacgagtttttactcttttgctaccacgctttctctcactacactctcactctctctctctttccaaatcacccttgctttcttcctttccctttctatcccttcttctcagatacacacaccactgcggaagcaccaaaataagaataagaaaccctaattgcacactcttcaggtgcgtgtctcactctctttttctttacccaactaagtccactcccccccctctcgtacgggggttggttttgttatgcgcgatgatgacgtggatctgcttgttctgttgcagggaaaattgaggaagaaaatttcgatttctttcctcttttatttggtttttgtttttgtttctgtttcgagaaaactttgattttgaggaattaagggttgggatttatgtccttcaatcaatcaaagtccgataagagcgacgctgtgtaccgaaaatccgggcgatccggcagcttcaatcagcagcgcggtcccttcggcggtgcgtacggtaagggcggcggcggcggtgccggaccttctccgtcgctctcctctagccggaggtgagttttaagggtttgctaattcatattttttccgtctttttctttcatttttgttgaactattgcgtgtttttatgaatagtagggggatatggggttgtgatttttatttgagctttttttcttgtgtggtattggtttgtgttgttttcagtgtggggtggtgtggattttgaaacttggtttgtttcgtggtgacctagggttatatgatttgcgtgtttttttagcgattcttattgattcttattgttgcttgtgttagttttaacaagaagtctaataataatgcacaaggtgggcaatctagggtaaaccctactccggtgaattcgaccgagtctaatagtacttatgcagcccggactgtaccaaacggttcctatgtacagccgcagattcatggtaagcttgatgaagatgtatcatatatgtgtttttaaaaattggtttttgagtgcgtggttatgttgttgagtggaattatttgcattccattttgcaatggaagaatgagcagattttatgtatgtgtttgactgttttggtaaaatgtgatagtcttttatggacaccattcacctatttgtgctgtacaatataggaggatcggatgcaccaattacaaatgcaactgccaagtcatctgaactgttggctgcacagaggagctccagagctgttccaaaagctcctacttctcaacctccctccatgagtcctgatccagcagctcctacaacccctgctaagggtatgtcactcttctaggtttttaatgctgtccataaagtgcagaataagttctatcatttctgaattgtagtttggggtcatagtgaagtgacatgttatgaaataactttttatccattacagctgacctgtgagattgatctgtatgttgttttatgccccagcagatgcatctaaggcattccctttccagtttggatctattagtcctggctttatgaatgggatggcagtaagtttcttagctgctaatttcttaccatccacctgaagttaatttttgtgcattacataatgcctggaattatatgggggttaatcatgttttgttattacatgcagattcctgctcgcacaagctctgctcctcctaatatagatgaacagaggcgtgatcaagtatgcagattattctctgctccttcctccttgttatatgtacaccaatatagatatagatttactgtcactgcctaataggttagaaggaaagatggtgtaattggtgatcactgatttcaactcctctattgtcttggaaagttcattaggattccttttacaaaaaatagaatctgacaacgggtcatcgggtgcttttatgtttttgtactcagtctagaagttgttttcttcacttgtttacatactaattccagtatttgtttggtgtctaatttcaaacttgcaggctcgacatgattctcttagacctgtaccctcaatgccaacacctcctgttccaaagcagcatctggtgaagaaggatacaggtgttgctgaccaatctaatgctggggagattcatactgggattagggcaaaaaaggatactcaaatgtcaccattacccccagcaagccagatgcagaagccttctgtcatttctttatctggaatgtcaatgcctatgccatatcaccaccagtcacaggcatctgtacactttggtggtcctaatccacagattcagtcatcggcacctcttcagatgccattaccaatgcctttaccgattggaagtggagcacaagtgcaacaacaggtttttgttccaagccttcaacctcatcctatccatcctcagggaatcatgcatcagggccaaagcatgggtttcactcctcaaattggccctcagttgacccatcagttaggcaacatggctattggaattagcccacaatatccaccacagcaaggaggaaaatttgctgctcgtaaaactactcctgtcaagataactcaccctgagacacatgaagagctaagacttgataaaaggacagatgcatattcagatggtgggtcatctggttcaaggcatcattctggcatgccttctcaatctcag

SEQ ID NO: 270 - DNA, 7000 bp, Glycine max
ctactctagaaccattctaagtttctctttgagtcccagcttgcttttatgtgtttttcattgctttaattgttgaaaaatccctgaaaatttgtcttgttaaaactctattggtttatctttcatttcattttttgggtctttggttattgcttgtctctttgtttccttgattgtgagttgccatatagggaattggaaaggaggattggtgccatcccttgaagaatttgagtcaagaagcaagggaaaaaccaccttaagagctattggactaagaagcactccaaattgagtgaatcaccaaagagagagcaaccaccaaaattgaggaccttgttgtaattttgtaattgacaatttacttactttcattgctttcaaattttgtaacaaaaaggcctttcattggaagtaagttgggagcctccaataggtcaccctacttccatttgtgtgtaataatgttaggcaattttcccttaagattgtgagtgttttgttgggaaccttaaatgtggtcatccaaacactcttaggattcgcctagtttacatttcttacttactttcatagcttatttcctttaccttccattgtcaaaccgcctagatagcttgccttttaccaattagtttttaccttatctttcacacctcttttagtgtttattttggctagtttcaaccatagcttcttttagcttttgttttcaaacccccaacaagaaagaaccacaacttaggaaccaacatgagtcttcattcttcatctagtgttaatagtgagggttctactcctaaggaccccttgtataagatattagatgagttgagatcccttaagttgttgaaataaaaacaagagagaaaagaaaaaggaaaaaaaagagtggaagaaataagtcaagatgaaagagagaaaataagagaggaagaaagaagaaaattaatgaaagaaatgaaaagagaaaaacatgcctcctatagtagtcataactcttgcaagagcctaagtgaagaacttcatgactattatgaaggaaggaataagtcacatcttagatctcactcatataggagagaaaatgaaagaaagcctcaagaggctaacattaacctcccatacttccatgggaaggagaatgtagaggcttacttagattgggaaataaggatagagcaaaaacttaaaagaaagtctactttaaaatcttatggatctcattcttatccaaagaaagaccaaggtctaggcatcttaggggcagcaccttctaagcccaaagatgataaggggaagacaatagaaaaacaaccccctaaggctagtatgctagaaaagactagctctataaagtgctttaaatgtcttcgaagaggacacattacttctcaatgccccaccaagaaaaccatgattatgaggagccaagacatttatagtagccaagacaaggctactacttcaccttcctctagtgaaagtgaagaagcaaaaggggaagaatttagtgaagaaatctatccccaagaagaaggacaacctttaatggttaaggagaagtgtaaggaggtaagtgtctcctccaagaggttagctaagaaggaaaggcattttgaaataaagacaaatattaaagaaatttcccctcttagacaacctccacattttctcctttgtaaaaagacacttgttagcattgccacacctcttaggcttgagtttattcctcaagtaaaggagttattggatggaggtttggttcgttagagcttaaatccttgtgctttgttggtgcccaaaataggtattattaggcaccaaattcctaaaataggtggtatgatgaatgttttgagtggtgcaaccctcttttgtaaaatcactcgtgcacccaacatcttcatgatttgtgtacatagggactcattaagtaggtttgttcttatttttagtttcaatacaaacttagatactcatatgggacaccttaggcttgtcatacttttgggtaggaataatcaacatgaaaatacaaaaaaggtatgttttattgtattacttttcttaattttttaaatagtgatcaaggggttcccatgaacactaagagaataaaggtcattcctgagtggcccactcaaccaagtataaggaaaatttggggcttccataacttcacaaagttttacaaaaggtttgtcccatatttttctatacttgtagcaccactcattgagttggtgaggaaccatgttccttcatgggaagatgcccaggaaatgggttttcagaccttaccttacttcaacataccaaacaccactaatatatatgtttttgttctttttacaggtgttgaggaaaaaagcccggagtttcaagaacctcgggatttgaggtcaaatccttttcaaggggggagagaatgatgcaattctaccctgcaagggcattagttagaagactccaagtagattgggccagagatgcaagagaaggccctagggttctcatgagacttagggaagattttgggcccatgggctaagtatgagtccacttatctttgtacatattagattaaggtttcattatttttggactccataatgtaggaaaggtaccctagaaatgtaggatttttcagcccttgtattttagggcacctagactagtttttgtattaggggtagttttgtaatttcacaagcattaagtgaatatttgatgtgtgtgttggaaaataaatttaattaaattgggagaagcccaatccaattaaattttagagggggaggtgagcattttcttgctacaccctattgtcacatcatatagtcacactttgtgcatgttcttcatgctttacatgccacatcatatgttggacttgatcttgaattagtgggctgaaccatagctaaaattaactaatcataattagtgaaattttggctccaaaatttggctccacaaattcaatttcaaattcaagtgaaatttgaatagaaattcaaatttccctccaattttgtatgacacttaggctataaatagaggtcttgtgtgtgcattttttttaactttgatcatttgagaattaaacttcaaacttcaaacttctttagaggcactaaatttcgtgctcttttcttcctctcccttcattcatcttctcctaccttcaagctcttatctatggattcctatggtggtgagcttattctagactcatcttctccttgaagtggcgtctcctctcaactcttcttcttctccattctgctgcaatcatacctcaagaagtaaaggactccattgttgaagaagatccaaggcctacaagctccacatggagctacatcagtggcttggtagaaaataatacttgggatgtgaaaagcttgttataagatttgtgtaagagctagaagtgatggtgaaaaatacttgggatgtaaaacttggtgggtagttaagaacttgacgtagtttcagtgataatataaaattctatgtgcatttgcttttcttgttatttgttttcagtactaactgtgggttgacatttgagctattttgaaaacaagtttttcaatctattatgtatcatttatctcttttttcttaagaaaaccttatttcttcatttttaacatacaaatgatatctttgttcttagaaaaaaggttgcaatttttttttcaatcacaattcaatcccccttgtgatttttgcctttatacatgtgaacatgtttaaagcaatttcaaaactttagatcaataagagttaaattgcaaaacccaatcatgtgaaaatttctaaaatctaatataattcaaactaaagaaaacattttcacatgttcgaaatcatattaaatagatatcaagagtctccaatgagtttagaaaataaaacacgggttcaatatgtcattggaagtccatatttttaaattgtgtttatattgagagcaagattaagtcattggatcaaaccattacatttctactaagatgactacataaataatattttatcaaatcaacccattccaaatatccttcatcgccaccttatataacttaaaaataatttgacaaccatacatataagaatttaatgagtcttgtataaaaaaaagataataaatatcaacaaaaaagaaataaaaaattaaaccttctaattatcagggtcttgatagtactgaaaatctagataccaatcacgatcttcaaatagaggataatatatttcttcaccaccgagatgaaaaatacgaagctcacaaagatcatcactattaatgtttaaaagcaagatgtgttttccaagaagtttgtagagacatcctaagagatgaagcccatgattgagaaaagcaaggtctccttcaatttccaaatcaacacgatgaaaaattgattggttgtcttcaagttcaaattcatcaaatcgtctatttgtagttagttgttttgctaatgaaaatggaagttcaatcttatcctacaatggttgaaaataaaaaataatgaatgtacatgataacacttatagttgaagaattatgatattacacataccttatcaaggtctaatatgacttgcaaagtacgatatgcaatgaaagacacataaacaacttgcagttcttaaaatttatctatccttgaacatatacctaatctcaggtcacattatcacaaacaaaacacaccagtcacgaataatttatgcaccaatcattaaaaagattggctatgcaaacaaaaaataagaaaaaaaaatctctattataagagtaagaaaaggattaattttacatattgtagtagtgtattgatttgaagtcatgaaggaaaactcactgcaggatgaaattggtgataatagactaaatggtatgagtacaatgttaacaatgcaaatacaaacaaagaggaagaataaaagggaaagagtgcaaaagggatgaagaggttcaactctattcaatgaaatgaaaagtcttaatgtacaagagagacaaaggagaaatataaaggaaacatacaataagactaaactacctttactagtatgtaaaataacaaaaatatatattattaactccccccacaaactcactatgcatcaacaggaagagtttgctagttaagaagcgaaaacacttagtggaataaagttttgtgaacaaatcaacaaactacatggaggaagagacataaggtaaagtaatggttccctgaagataatgatgtctagtataattacaatcaatctcaatatgtttggtgcgctgatggaagaccgaaattatgactgattttgatatcacttatgttgtgacaatgcatggggtcaatgtagaaagagagatacccatagagttaagtaaccatctcaactagacaatctctatagtagtggatgtcatggctttgtactcgactttggttgaagatttagacacaactacttgcttcttacttttccaaaaaaaaaagagaatccctcaaaatgatgcaaaaccatatggtagacttacgattagtggaattactatcccaatttgcataagaaaaaacacataactccaaggaagaagatgaggcaaaaaagaaaactatgaaatggggagcctcaaagattgcaaaggatgtgaaaaataactggccaatgagttgtagtgggagaaagaacaaactgactaaccacatgcacatcgtaggcaatattaggtctagtcatggtaagatacaccaagctgccaacaagagtacgatacaaagtgggtatattaggcattacatatgctcaagaggggtctccttggtttgagtgttaaagagacgagcttgatcaaggatgttggcaatgtatttagattgagagagaagacaacctctaggagaatatgcaacttcaatgccccaaaagtaacaaagagtacccaaatctttcatctcaaaccattaagccaattgtaattcaactccattatcccatcaatatcatcccaacaataatcatatcatcaacatataatgatagtagtatacacccaggagaggtacacctaacaaaaaatgcaaaatcatggggactagaatgaaagccaagggattcaatcacaatggataactttttaaaccaagctctaggaacttatttgataccatagagagatttcttcagtttacaaatttcattcagattatgagagacacctgggagagaaaccatatacacttcttcttgaatatcaccatttaagaaatcaattttaacatccatttgtgagatatgaaattgatagacagaagcaacaacaatgatagtgcaaataatgatcattttggcaacatgagcaaaggttttttcataatccataccatattgttgggaaaacaccttggcaaccaagcgagctttgtatctctctacaaacccttcaaatttggttttcatcttgtaggcccaatgacatctaattgcactttttcatggaggaagagagacaatatccaaagcatttgtcttgtgcaaaatagaaagttcctatgctatatgttagaacctaagacattggatgatgtcaggtccctaaatctctatgattttttataataacaaatatattagattttgtatgaaccgaactaatagatttcactcagttttattggaactacaatgtccaatcatgtgttggtaacaaattccatagcttaagtattaattgatacactcttttatcatccaaagaattagtacttgttttacttataggggaaaacaatgtccaatgagttgtaactaaacaagtgtccaagaatctttgtgaaaaccaacatccgatgtgttgtgcaatttaaatgttcaaaaagggactaactaacttacacaaacatatttatatccaagttagttaacgtccaatatgagctcgtacacttgcacactcacaagattgatacac

SEQ ID NO: 271 - DNA, 3169 bp, Glycine max
agtacacgacatgaaatcagtgaaattaatttcccgataatcaagtatgcactcagagaacaactagaaatacattgtaccgaaatttcatcaaattaaataaaataattttaaccttaacacatgaatctaccataaaaatatcagtctccccaaactgtccaaacggacaattcaagattgaatacaatgattaatgcaaactgtctgcaagaatcattgcctccagtctcaaacgggaatctaaggttcactcatcatgaacacaatttgtatagcatatatcaattgtcattaatggcagtgaacacgtaataaaaatattaattggtaacaagcatttgtacctatgatgatgagcagtacaatccaaaatgaaagcaagaatcaaagaaataactgaatgaacacctacatcaatcatcattccgaaaaacacatatcaatatatgtgtgtctgtgtgtgtgtgtctctaatgagggtgtgtgtgtgtgtctctatgtgtttgatttcacatgttattaattaaggaggtgtgactaggttaaataagacgacaagttccctacaatgtggagaatctaatccctacaatgtggagaatctaatagggaggacaatgctacactctatatttcctccttcaaaaccaaaacatcccaaaattaaaacatcaatcagaacttagaagcaaaactaataaacagattagaggaagactagagaaaactctaaaagaatcattatgaagggctttcatcgaaacagatttccaaatatttggtttttgacagagcataatagcatcacttgatcaaagtagcagaccccgcctagtgggtaggagacttttgttgttgtgttgaatgaatcattagtgcgttccatgaattaggaccaatttctgattattaggttatgtctttatgaaggtttgtgtgtaaagcctttgtttttataccactgactttccaaactatttttagagaatttcattagaaactgattttaatttgttaagaaatttcctaaaaagtaggagtgggtggaagtgatgtaactttgtgttaatggaaatatttattttttctcttcctgtaaatggaaatctttatttttgtttccaatccaatggattaccaatatgccacatgattgaccgtcatcaaagtcaatgaatgtattattaacacttataacatagtaattcataaatcccaattaaatccatctttgaggtattgaattctcgatgccagtatcttagagagattaatttatactgactttgagctaaagcgcatccttgattttaaaaaagaaaattagaattatgatttatgatttatgagccttttttttcctatcttccttctctgtgttggggtggatatgtggggaacacaggggaagagtggcaatttagtttttgaagaaataaccaataggatgtgtttagaagaaagctcaacaagaaagctctctttttgactggtttttgtttggttctaagaacggatctttaaaggtttggattttggttggttagttatcatttgctggaggttaggtttggttaaaattggataattttgatataataaatatgtgtgtttaaatttattttaatcataaattttatattatagtaatatacgtcaaggactagcattaagtttcattatgttgttttcttgcaaaataattgtagtgaagaaacattgatgcttggtaatatggtatgatggtaccatccccattccccgccacagcaattgtatatttctcaacagctttacattcagggcaggggtctttaataagctgtaagctcgaaaacaaaggatatgcaataatagttattttttaaattatttcaactttgaatgtacattgagtaaatcatatttgatatgtatctagtttcttttttggatatatatttcttattgggaaatcattgttaatttgttattcaacttaccaaaagatggcacgatatggcaatggcatggccaggggaggttgaatggggtacttttgttaaacgtggctcttataaaacaagactgttaggagtgtgtatttttttttttttaaatagtaacaccactcactcaaattcaatactcatttacctgaacaaaaatataccaaataagagaagatttggatgtcacccgcaggccagagctggtcggtctctgcttcatcagcctagctaattaggtaaattttgtgtggcttggagtattaatttatttttctttttaacatacatactttgctttatgtccataaattggttttgattcattgcctacataaactgcaactataatgagcttccccttggaaaaagaaaattttctagtattttttaatatcatgtttttgttgtaaatttcaatttcaatattattgcatgttgtgaattcaccccttgctgcggagtcgtgttttatttacttgattgggcttttatcttcatattgggttttttatctttcttaatttgcatggtgagcctgatggcttaattctaaattttggttgttgcatgcaacatggaagcttatgtgaagtgaccagatggaagaatgaaaatgaggagtacgatggtgtggggttttgtgctgcctattggtgcaagaatcgtggttaactgagttttattaagctactgaagtgaactgagtggatatggcttctatgtgcatcagaaatagccaagtaaaattctgaagaactacttactaccttggtattcaggggttgttcccagcttcttccttctgttatcaattattttactatagtacagagtaacttctttttatgatgcaggctaagaattttctaccatgtaggagggaattcgaaccatgttactcaatttaattgacaaaactctagctaccacacgagtaatgttttttagtggacttagatatctcataattgaaaatgacctgctggtacataattcaaaatgttctaaccaaaaaaaaacaaaaccatttttattaatcattatcctaaaaactaattagtggggtactagaacaagttcaggctaagaagaaaaaaaaatggagattgttcctgtcatgactgcctttgatctgattcaaagaagtttttcgaagatttccctgtttgatgagt

SEQ ID NO: 272 - DNA, 3700 bp, Glycine max
tgtctaatgccggagagcattcctatccaattccgttagcaaagaatattcctagaataagattaggaattctgttaggcatatgcactatatatatgagtatgtaataaccaacaaatcaataagaacaattacacttttcctgcctttgcccggttctcccttttattctcggaggtactagccctcgaagccagcattaactctttttccacgtatcaattgtaatccctcgtatctacatgtttgtctttcctaggcttgctttagcttctagggatacatttttcactttcataaccttttaattaaacaacatacctaatgtagccaaggctccctcccctatctttaaattttagcatacattgtttaattttttatacaacattttttaaaaggaggtgttacaagatttaaaatttaacaaaattgataaagaggtgaagtagtcaaaagggaaaattattttaattgaccaactggccacaagagctgaaaaaataaaacataagaatacaaccataacatatcttaacaagagcgtgcattgaaataaaaactaaaatgttaacaactacaggatctaaccaacattaaattgagtgagggtagtaagatccgtagttactaacttttccacatcagctggatcaacaacttcacaccgcataaaaaaacaagaccccaattatattctatttctatcagattcactccttcaacaaaattatacaagactatttttctagtccacttacttctacgttgaatgctcccaggtggaatccagtatacccttcttgaacggtgtcaacaagtggaaaaaattatgggtacctgtagaaaaattttaatgtttaaagagtaaaaaaaaaaaggtctgggaacaccaaggtgtagatgagaaggaagcagagaaaaaaaagcatagtctatatcgttccatatggcatggcatgcaactaaactagaccacagggttcaaatctactagggatcactataagtttttcttctatgaaatatagcaagacacatcattacgaacatcagtctttcaaaaggattaagtataactagtaaaaaagaaggcgcagaacaaaagccatgtgtgacaaacctcgcaaataaattttgtcattccaacacccattcttttgataatgtccacaattgcatcctgatagctgcaaaattaatcattgccaacatttaatttgtttgtcatagaatgcacacccataactctaattacatatataactctaaatgatagtactagtatttggtagagcaattaaatatacttcattaaactatgaagaaaacatgatgcttaatgcaataggtgttggaaaaatataccttattttagtgagtgaacataacatccctcacataatctctctctctctcttccaattttggtctgtgagtggtaagggcacaaggcatataccaagaattcttccaccggatctgcttgtttccaacattattaaatgaaagtaggaagcaaaagaataaagataataactcatactaagttcttcagctgcttcaaaatttgcccacattagcacactagttcctctgaaagatcctccactagaaagcaaaagattgtaagctcaagttccaccgctagctttcttgtgtgctcaagttctctcaaatcaatgaagcttgaatttttcaggtgaaatgatctaaccatatcattatctacatgcaacaaaatatgaatgaacactagaagaaaatttggttgataaacaaaatgatataggagggaatcaccaagtagcaatgttgttaagtaattattagagagtttgatacactaaatttcaaaaccgaaacaagttcttttaatgcaatctgcaatttgtcagtgctttgttagttaatacaaaaaaatagaatgcagaagaggcgttccttaaaattgacttttgcaaaaaagtcctggagaaataaaaagtgagtcctgttaagtgcattagatgtgtggaccaatctaaaaaactaataagaactagaaaaaacatgtttgactaaccacctcaagctagggctgtagagcaagcttttgagctctatcatcttttaactgctaaggaataacttcatagttgcacatgtaaattaggtggattctaaacctataatagagtttttatcattttgaacctgctctaaatctgaccttgcacaaaaatacaacacaaagattagtagccaaagtgatttcccatcataaagagagaccaatatgcatactcatacttgtattccattttccctattgtacggtccaaggtcaatatcgcttgttccattttctcacctgttaactcgagagatttttacatgagctagctaacatttagagaggaaacaacatagctttttattattttttataaaaaaaacattaatcaaggcactcacatgatcaaataatttgattattcaaaggattacaaagcctagaataaaaaaaaaattgaaatggtaagatgattaaaatttgaatgagaaatggcaattggaatttggaagaacaaaaaagagcaaaagccaaaataaagtgaaatttaagtgagaaataagaaataggtagcaatctaaaacaacaagtgaattccagtttcatatcctattatattccaccgaattccctcccttgccttcctaatcctacacacctaccatgagtgtgattggttacaacttaccattcaaaaacctaagatactctctccttgcatcttaccttatcactagtacgagctactaatcccctagtatccgttctatttcttttaacatcaacttagtaattgtgctagacaaaaccagattctagacataataggtacggtggcaataactactacacattttaaacatcgtatcaccatcacatctcatgattaacaaatcatcatcatttcctttgtgagaactgatgtgtgctccaattcataaaaaataattggcaaaaatatcaaattgggtcttttttataatttttttttatcaaaatgggtttgttttgtaattatttactctacaggtctctttttttactacaacgcgcctacccgggaggaagcggtggtctgtcaggcacgaccactagtggtggcctgccaggcgcgaccactagtggtagcctgacacttccttcttccctataaaacccttcgtcctccgtttcatttgcgctacgaaatcgttaaaataaattaacatcaacaaattactcaaaataaattaaattactgtaaaaaaatttgctcaaaactagtatatattttttatcttcgatatattatagcattatttaatatttattctgttgatgataataatgattatattttgtaggtgcataaacaaattgacacggactataaaatgaaatagtaactttgtttatattttttgtgataaatagtaattttttgtaacttgataatttaatttttggttataattatgttgtgtttatatatgttatatttgtttgttgatgacaacaattatttattgtagtagtttttatgtccaccacactattattattagtagttaagctcataattattgatgttgttggtatatttttttaatagccaaaatttacatagacgttaaaaataaatgccgattattttgcatcatgagt

SEQ ID NO: 273 - DNA, 3978 bp, Glycine max
agaagcatcccaaatgatagtatcattcatgttggggttgataaaaatgctactgataagacaagagactgtaatgttcaaagggcaccttgagaatgaatatccttaacctcctagttaacataagatatattaacataataaaccaaattgcagagaggaccttgaggaaaccatctatcaaaccaaacaaaaacaaaacctaccccaattctaaatttgaacctaggttgaaggatgacaaaggacaaaacctgccttgggatgattctttgaaagcaattgaacccaaagcttattgggctcatgtaataaagaccagacatgcttccccaacagggtgccattcatctcccttgctgttctaatccaaaaacctccacgagtatttagctgaatatgagaggaaccctagataaaggttctcgtaattttgtcaatttcatcacgaactctattgggaagaagtgaattttgcgtaaggtacacatgaatagagttaagcatagacttggctagagttgtcctccgtgccctacttagtaaattcaaattccaaccaaccaatctactctttgctctgtcaattacatattcaaagtcgctcttcttaattctgctagctagaagagggaagcccaagtaccttcctaaatgcatggtatggacaaaaccaataatgctagtgaacttctccttcttacccgagagatattcctagaagctaggaacttggatttttgaaagttcactttaagtccagaagcctttcagaaatcatgtagaaaactttggactaatctcacttgagaagattgaggtgaaaatgaggcttatctacaaaaaataaatgagatattttaatcaatgatcttgagttttatgaacttaagtctttgatatgtaactctattaaaaatttagaaggaaaatttaatcattcaattcggcttaaacaagattttcttcaataaaaaatacatgtgatctaaaaaattattaattcaaaatatataataggaaatatatttacataaattacacactaaacattattttaaatacacaatactgcaattgttaataattagtttcacatgccacaaaaaatcatcatgagtttataataaaaaatagctctgtgttgatcatcattttttacaagctattgctttgcaagaaaaaaattggtaggcctatggtgtgtctgatattcgatttgttttcaaaaatatacacaatgtcatatctgaactcatgcagtcaagaccaactgtttgagctacacaaatttataatgacaaaatgaacaaagattagacaagaaaagcaacaagaatatgggaagaatactgatatgaattaggaacagaaaatatttgtttgatgtggctcaaattccaagttatcaattatttgtatagtactgtttgtaaaattgacctttgacaaaggttataaatagttttagatttaaatttattttttatcttttaaatttgaggtaatcttatttttggttccccaattttaaatttacttttttagtgtttctcaatttatttttttaaaaaaaaaaatctttttagtccctctccaaaagaaaacctatattaatttgggggtgattatgatgttttttatggcaatggactaaaaagagtatttttttaaaaaaaaaattggagaactgaaaaagaaaatttaaatttgggggactgaaataaaagtaatccaaatttgaaagatcataattatatttaagtcatatttttaattctcaaattaatttagataatactaataaattcatttgattgaaaatatacaatcatttagaacttttaaaataacaagaaagattataaaaaggaaaatattattaaaaaagaaaacaaatgatacttaagtatattatttaaaaaggagaaaatatacaattatctccaagataaaagactataaaaggacacaacaaattcaattaaaattaaaaaatatataaaatagaatttaaatgtcatgatttccacaattagagccccaaataaaaataggaggttaatttctaggcatatgtactgctgattaataaaaaattatgatagatataacttgtaagtttctttgtgtaatttaaaatttaccttgtataataaatttgtttatttttatactaattatcttacaaataccacttataagataattattataaaaattatgatagatatacttgtaagtttctttgtgtaatttaaaattttccttagtaagtttgtttatttttttatactaattatcttacaaataaaacttataagataattattataaaaattaatcatacattacaaaatttaaattgaaaaaaataataatgaaagcttttgttgctggctttggagaattagtcacattcttaaaggagctttggagaaggactcaagatataagtattgggtaaggggaactttatgaaactagtcttgaagacttgtgagttgttttatgttattatgttgatatgatgattggtgaactctttttgaagaatttgaccttaaagtgatgttcttggtgaaagtttgttgcttgaatgttgaagtgtgatttttttttcttcatgtttttgcctcattttgtgtcacaaaattatatgctactactattttatatgtttttatcttcattattagctagaaaaaatgtgtttatatgttgtgctatgatgaatttttgttttggtacgaggctttgatgatttgaagcaaaaagcctagaactttgcgagacacaacttttgtcctttggacaatcactattaagtttaaaaaatttgtgtaagtatggattaagatttaagaaccataataatttagttaaagaaacttcataaaaataggaactttgatgaaaacactggctaaaataaattattaaatcttattacggtaagactgacttaataaaactataagtcattaataatggattactgaacttgaaaagattggattaaaggcaaagtaattagaattggttttgaaacctaaattgaaattttggttaaataaattcactgcatttgtattccaaactcaaataaagatgtaaagtcaaatatcacacaaacgtgaataagaaacatagacgagtgtgcaagaatcaaacaactagctattatttggggaatctttttattcctcggacaaactttgaatcttcctaaattgttgctttaatcatgcatgagtatgcaagaatcaagtaactgaatcttctttggtcatgcaaaaacccccaattaatgtatgattgaaaattgaagcataaacacttttcttgttgtagtaaagtagcagcctacatgcgtcgtttgcaaaactgcttgggttgctaacgtatgatacataacttgcgtgacgtgatcacaccaccaatatgcaaaatacaaattgcaccaactctcagacacgaatcgacaactcatgcgtgttttgattcaaaacaagatggcaatgggaagggactgaaaccgatatgtggttccccattcctgcctccccaaacacatccccgtttcctacatatatatagtttttggagtgctgctaggtgtacccagcagttttgctggtgcacccaacaattattgtgaaaaggtcataattccctcactaatttattttttaaaatgaaacctctctctctctccccgcgtttgtgcttctgcttcttcttctttcggatcaactcttcttcttcctgcttcttcttcattctttgggcgtcttcttctttattccttgtgcgtcttctttgtgcctcttcttcttcttcgttgaggaggttgccgccattgttgcggtggtgctgcaaggaagcttctgcgaagagcaacgatcgttgaggaggttagtgcgtccaccgtcgaggtaagcaccgtgaaccttacccttttttgctccagtgttg

SEQ ID NO: 274 - DNA, 4722 bp, Glycine max
tgtctatttctattttttcatatacactatatatatggatttcattttcaataaaagtatttttggcatttgataaaattttgtgagaacttctctctgggttcctcgctgaaccaatctcaggcttatcaaagtaatccttgtggcatctactctgatttatttttcctcactggaagttgcgtcaacccaaaactttgtgaccttatcgggatttacatattaatattataattcctccttggagatgcacaattgaaaagtagtagcaagtaaaggagactttatgaacgccacataagttgagcaaattaaggaattcctcattagtgtagccccaaaagtaaggaaacgagacccgggaaaagattaaaagatttataggcttaatattcatagtcattctctttttttccctttcacatgtacttatttaggcttcatatcttgcaaaaacactttttcttttcttttcttttcccatctttttaccaatgtgactgaagtcataacgtccaactcttgcgcggcatgagaagggtctcaccccatcattgacctaacaagtaatggtcttactcagctacccttgtcaaattcttatttaagatattaattaaggactaaataatatagtagcgtgtgaatactacggaacggaagcaatgatggggatgttgagctggtccttgacattaagatcactcacattatagtttatcaactacacaataagattttttgggttgagagagacaagcatgttgagatgcaatttttctaccttgatcatacttcaagataaagcgttaaaagtaatatatgttggaatataatgattatttttcatattaagaatttgagagggaccaattatggagtgcattaaggcaccttttattcaagtcttgccaaatcacacggggttgagctctcttatttatgaacgtgagaatttagattaaaataatataagataattttatactgtaatttaataacaaaacaactataacttttaaaataataattataaatatcaacaaatttttcatacatgcactatcatgatcatgtttggatctgagtcgaagatacacgtttaaagaaaaatcatgttaaaattctccatatgacacaaaaacatgaattcctaactttagatttacgcacattcatttgttgtcaatagattttcaaacatgatgatagtctacaattagataacagtataaattcgttttaaattgtgaatgcataatttttttctctaataaaattaaatataaattgtaaggtgactattagtaaaattcaagattgttattatcattaataatgacaaatcaatgacttttcaatttctttcatattcctagctaaaagcggttatttttaggattttttatgaataatcaactttattcttacaagatcaaaaatttaaattcagtctctaaatataaaaaagtatgatatgttagttatactaataacttaataacaaattgatttaaattttacaaattaatattaaattaattttcaaaaaatataatttatcatcaaattaatttttaatattataatttaataataaaattatctcacacatttataacagaattaatttatcacatagacgctaaatttatatttgtaatctttcgctgaactaatctatcctagcattacattgtgttggatctggctcgtaagttagctggtctggatcccaaaatttgcaaatcgacataattccgttgctgacagaaagcaaagtgaatgccaaattggcattgatgatttgacacactgtctcaacatttgtttgtattacacataccctttttttcttcaaaaaagagccgacacgtgacactatgaaactcgataaccagataagcaattctaaaccaataaaaatttagggtacaattacatgaatctcatcatacaagtacgctcacttttgaaaagaaaaactttatcatgaaaaaatgtgcattatgaaaagaaggaagaaagagaacatgcacgcaccttaccttatccccatatattgcccttgtacttttaatttgtaaggacgatagaaaacgagtccttgtatctcattggtgtgatagtctctctctctcatcataattttagttgcttgccatcacttcgcatttttgaagtgattgtttggcaccacggaagaacaaaccccacttacctagtgcgccacacatgagtagcacctagcaaaatacacatagaagataagatcttcaactgggtgtaattcaagatgaggtgtcaacaaaaatatagcttagttacattggaattgaaaagcaaagtgatctaaatattaattattaattttatcagatttttattgatatatattaactattagttttattaaattttatttaaaaaatttaaactcaagatctatatatctttttcttttatgtcactgaatcaatcttatattttctaatcctctcacggtcttaaaagaatttcaaagttgaaagattaattttatgtaatgccaaaaaaaaattcgaagtacatgacatcgtcctttgtcctaaacctgaaatgagacccaccatctagcttgccggacactaccagaaaattaacagctaatgcaaacatacaaaacccattggtgcctgtcatgaggttttaacattttccttgattggacccaataatgccagcttcagttaagtataaggtatatttgaaaacaaaaggagcaaagctacaaccccaatagattcatttgttatttcaaattctttttatcaataaatagttggtctcactagaattgaaaaaaaaaaaaatttaagtttgaattttgtaaataaaaaaaatgtttaaaaaaagacttcactgaaaataaactactattaggattttgataaaaattaattatccattgataaaaattaaacgccagtaaaatcggtttatatgctattaacatgcatgcccaaaaattctgtcacacccaaccaaatctcatttggctatcacaatccgttccttttctatgcaggaaaggcataaccgtcaagtaccgcttgtccgtattaagggtcaagtggtcatgtccgccttttcatttcccatatattttctttgttctgcaaaaatattttcatccacacacaataaaaaaaaaaaaaactccctccattcttaatatgtagttttagcatattttttttgttttagaattttggttgcttcacaatttcgatatataattatgcatttttttaataatattcaattttatgtagtgttgtgattatgatgattaattaataattttgaatttcacaatatatttataatggattatatattattagtggcacatttatattgaaaagaaattttattccattaaaggtggcataaaaagatcaaaaagtggattgtcaataatcataaaaaattaaagttataaatcaaataatataaaataatataaaaagttttttttgtcttttgtcagaaattatatatttacctactttaccatcagatgagatattactcattaagttataaactagtttcatttgcgatacataatttaaaaaaaatatcatttcccaacatataaaacaataagcaagaatatttttataaaaattaaatgttttttaatttgtgcatttttttatccataaaaactaaaagtaatattaaaaatttatagcaactcatgaacccttattaattaatatatatccttttgacttcttaatatgtgtatataaataaatattgtttacaaatgaagagagtactatttaatgttataaataccttctaccaactaccgtattattttaataaaaaaaattatttattatttactttcttcttctttttttatcaagagggtggcctaagccacgcgtttacattctttaggaggctcactaaaagtctacaataatgaaaattgaaaaccctaactgaaacaatgtctattgttggcaaatttactgtagggtgcttgttttaaaaacaatttactagataaggtctgttttaaaacaaattgcagagggtcttttatttatgtgggtgccgccattgttactggtgtgaagcttgtaacgtcgctggcaatggcgggagcgtggatgccgccattgacagcagcggaacagggatgccaacgtgcgcagtcccgccattgggtcctgcggcacaccttagaagagttgttggaggacgatgcgagaaggagaatgtggtggatcttgttattgtgctgtgaatggaagatgcacaagagagagttgtagaaggcggagtttgcaaggtgagtgacattttcggatgagagagattatgacgccaaactcggtcactcggttacatcttttgaattaaataacagtattaaaccagatctaaacacctgtctaagtttggacaccaacaacttaattttttgttttccaatacatatttttacaacactgttttgaagaaaaacatcaattacattaataatgtggatttaatttacttaacttattttagtacaatatcggatgagatgtttaaacttcaaaaaaaaaattatataaatatttttttaaacaagtagataaattttgttacttgaaaaagacaaaaaaaaatatttattttaagtaaaaacaagtttgcaaacaatcagaaaat

SEQ ID NO: 275 - DNA, 4100 bp, Glycine max
actatgaaaaatcattttaggactcaaaaatataattccttgtgtttttgtgaatattttgcaggtcacaaagcattttcaagggaaagtcaaaagtggaactaattatctcaacttgccacaacgaatggaatgttcaccacatcgaacgaggatcagaagtgaagcgccaaagtgtgcaaaaccatatttatgtctcgccaaagcaaatcggcaagtctaggacctggatcacgagttacatttgctacaacgatgtgtgtatgctatggtgaaagagtatccaaagacatgaaggttcaaagtgaaaaggatcatttgttgaagaataaggatttactgcaatgaatgctgatgttgtaacaaaataactgaattagttcctctatgaaaagccttgtaacaacaatttgaataatctttggatcatttttcttatttttgttttagggaaaagcttgagggggattctctctctctttctcttctttttatctcatcttttccaatttttatggtagattattgtttaaccatggaatttttcatagattttcattgttgatctgaatgaagtggatctccagcatatatgatttgtttgttgttcaacttttggtttatgcaatcctttctgcttcttttcttaattttcatgcttaggagtgatcaacctagcttttaagaatttgaattgtgtagaaacaagttcagatctcatatatgaagaagtagaatgtgtatgaatctattgctaggaataaagtaggtttatgcattgctgagatttcttgtgttccaatttctaggattagattacctaaggaattagggatttattctagaaattaaggatctcttacctaacaaattaggactagattgctttagttaaatctcagttgcgttgaaattggaagtatgatcagattcgaagttatatatgaagaaatttatggaattcagatccaacaacactttctccaccttgttttcatttttaaactctaaaaaatccaaaatattctaccattcgctgtaacaaattgatgtcccctaaccctaaatgcataatgatattgattagctatttgtcacatgaattgacaactcattgaagtgaaattatatttctatatcaatatccttttaacatctatcaactgctctttgtggacatttcgccactacgaattgacgtcttgctacaacgaaattatcctttgcaacaatatttatttttacttacataacaaaatatttctaatttcttagatattatacataatctttgtggatacaataatttttttatacttaaactaagtacacttgtctatatgttaaggttttgtaatcaaataaaattcaaataaacactaaacacacaaagtcccacacgatcatctgcgtttgagctcggtaaaaggaacatttcttaactattagtctctgtgttactcatgtaaataaaaaataagaaaatcttatttgtaaatatattaaaactggtcagatgaacccagttgttaactcaaattaatttttcttctacctgttatatatttttttattgttatgcgtttattctttttcttcttgtattctattgataattgattgttttaattggtaagtttatcctcaccatgcagatgatggaaactttcaagttgcaataataactatactttttacacaaaaactataaaaatatgattttttttccttaaaaagaatatgttgtgttttttcttctgagtccttaaaattttgttttatagagactaaaaaatatcatattttcaaaaaataaaaacatttaagtttaaatgaaaataaatatagttcaataatttttttatttaatatcttataaatacacatttttttgctggaatcttataaatacatattacaaataagcaatatttttatttaactattaaaaataattaagatattataatagaattttaaattattaatttaccaccaaagaaaattatcccgctaattaaagtaaaatggttgcttcggaattaattaatgtggtaacagaaaagtgaaggttggcaattactactctgtagttgatgcaagtcaacacccccaaatccaattacaccttccaatagggattatcaattgtgcatgttatggacataaagaacattgcatgagattaagaacgatccaacaaatggcataaacctatcatctccatctctgtttttgctgcacgcacatgggttgctccgattcatcccttaagccttaatctctgtcacttctccttttctaacaaagccaaaatccgtctcagcaattcatccttttttttattttcaaactttataaataatttgacataaaaaattacacgaattagtaacgagtttcaactttcaatggcctttgtgtattgtggtgcaatattgaatagaatagccaacctttaccactgacatatggtatattcttaacgagtaaattgcagtaatttctccttagatttattcaaattatatatgtatcttttttttatatattactttggtcttccattctctaaagtcagtaactaacgtgataatttttattttttttgcaatcttcaaaatgtctctccctctattcctaatacaaacctaaccctagtcttaatcttcatccgacgaccaaggtgcaaagggcaacaatggcaaaagacccaatgatgtttcaaatcttaggtaggtttatcccgatctagtgatgttgatggtgaagtcgtgcataaaccccacaacctgttcttgcagcaccccttctttgctttcgtataaatttattttttaaaatcatgtgctaatcacatgatcataaaaacaattgagttaatatcatttgagggggtagggtgcaaccgtaatgggaatggacatattatttttgtaaattaagtgaaaaaaaaaagaaatacgtgtaatgaagacctgagggagtattatcgtaatttgctcattcttaatttattttgtgatcattcaatactcatagtgtaatttaattaaggttgttgcactactacaaaagcgccattcaatgtcagttctcaagggcattctacgtcggtttttgatcgtctttgtctccgacgacgtgaaaaggtgtcaccctatccacgccggttgacaaggaccatcgtagaaatttcttaattctacgtcgtgcacgtggacatgcccgccctagaatgcaacgaagtctacggcagccctggcgatgcgaccgtcctagaaagcataggagtctacgacgggcacctagacaggcccgtcttagaatgtcttgcattctacgacgggcgtggctacgcgactgtcgtagaattcaactgattctaagacgggcacctggacaggcccgtcttagaatgtcttgcattctacgatgggcttggctagacgaccgttgtacaatgcgatcgatactaagacagacctgtccaggtgcctgacttagaatgtctttcattctatgatgggcctcgccagaaccgtcgtagaattgtttttttttttaaatggagcatgcagtgtggagaaacaaacctttgattttgtagtctcaattgaagaagcaatattggcctcaaatgctgctcatccatcaatgaaccactggtctttggcagcatcaaccccattgataagagggtactgttttccttttggatcgaaacaattcacacctaccccctacacctcctccactattagatgtatacacatgtaaattactaacaaaaaattcttaacaagacacataaggtcacattggttgttaatagaaccacatgacttgtgatatgatatgcaaattttgtttaatattcctacaactaattattacgtcttgcattctgtaaaatccttatcaatcacacgttatacttaaatggatcactgaatcatgccacaagttacatgcatgccacttgctacattgataaaatctacaccacatcgaaatctcagttattacccattccaatttccaatttaaatttgtcatagtagtatatgtaaaccttggtcatgaaatgaaaatttgat

SEQ ID NO: 276 - DNA, 5100 bp, Glycine max
gcgggtctcaggacatgatcgtctttgtatggtagtcggggaactcacgtgtccgccacgtgaaacaactaacgatacaaaggcgattgctgtgtgagaccgtcattgtatgttaagcacataattatggctttgccacactgtcagcagtctacgacgggtagtgggaaacatcatcattttgatgctattaattacgaatatgtcaccgccttagtttctacgacggttgtttagaaccgtcgtagattcagcgacggaaaatgcaccttttgtagtagtgttggtagaaaaaaataattaaggttgcaaaaattccaagctctaaacagtaaaagtgaatttaatgtgtaagatttttcgtgcattgtaatcctttttctcacagtgaatttggtgcttcaaattaatataggctttttttaatgattttaatatagacttttgagtggtcaaactatgttaatattactcaaaaaaagaaaacactgtgtcaatagtattttctattttttcactcgtaaaagaaaaaaaattgtttttatatatttatttcttcacaagttcaagaattaaaatattaattcttattttttcaattatattttttgtcttaaatattttacatacttattataaatgacatagaaaatatagtgaaagtcgtattcagaaattaaaaataatttcaatgcaaacaaagatatttattgcatttctgatttttgtaggctgggtagaaagatgaaagaagttttactgaccattgtctttaacaaactaataatactgatttcttgacatgtgcgatacacgcgataaaaggaagatttgagtgtttttatttatttatttaattataaaatgaacataaaatctactaaaaaatatgataattttttttatgattaaatgttcaaatttatatgcttagaagcaaaaatttatgaccacatctaaaattttgtaacatttttagttttttttttcatctgtggatatagtagaatactctcctgatttacaaaaatctatgactataaaaaaaatatcactcaaaatgatgagttctattaccgttgcccatgtaatgcatggatataaatatagacgagtgcgatataaatagaatatataataatttaaaaatatattttttatattgtcaaattataaaaaaatattttgatataaaaacaaatttaaacatcattaatataaaagttatatatattaaatttaaatacaaatatctaagagtttcttgacataaaaatattaatgattataaacaacataatcattccaatggatttgttatagtatgattactagtacatgcaatgcacaaatatataattatattttaggatgattcttagtttttttttgtaatttatgaaacaaatgaaaattttgtatgtagatgttaatgaaaaaggttaatttcatattaatttggagaaaatttacaaagattaaggacatgtattactgaaaaataaatttattaaagtttataaaaaaaaatatataatcatgttcatggatcattcaaatatagactgtcaattaatgttaatagttaatttagtgtaaactgtcaattaatatttcaatttttaatttttacaaataattgaaaattaattttgaattacattttatagaagaattcgtgttgtaaaaaaggtacatcctgaacctaacaaactttgtttttcttcgctctcccttttcaccttacttaattacctagtctctttcaaagcaaattaattaaaatgtataaatcaagtttaatgctgcataaatttcattattcatttcataaaaaaaaatccattattaatgatatcaagttcaccattgtcactctttctgatttctctatataattattaactttaagaaaaatcaattatcataaaaaatattaaaaaatctctattcttacttcaaggaaattcaaatacgtactattaaaaaaatcaattattcaatcaaccaatggctaattaaaaaaaaagaactatatgaaatatttttcaaattttaatttaccactaattcaaaaattgctagaacttttttcattgaaaatataagtaaaataaaaaagaaaaagacataatctttttgtgaaaaaaaaaaaactacaaattgaaattagtaggaaaaaaagagtgtagatcaagggattttgataaacaaaaatgattaaaaattttcaaattgaaaatcaaatgaaattgttatgatgtaataacaaaatacattaaaaaaaataacattgattaatatgaagaaaatgaaacagagagttgacgagataaaaacaatagatgaagaaaaatattataaaatagataaagaagaaaaatacataaaacataagaaaattttaagtataatgttattccaacataaacgtttatgtaatcgttaatattgttctcacgttatcacttataactaaatcaaacaagtaaaaaaaaataaaaattaaaaagactttaagcatgtaaaaagaaacataatttttctcttctttcacaataaaagaacacataagaagaaaaacataaaaagagcaaaaaaaacatgaaaaaaaagaaacacattaaaaaataatatatttttttctcttcgcctacctttttccttctctatatagatcaaaggatcaaaattttctttttacttttttttttcttttttaaagctagtaaagaagaaaaaatgcatctaagaaataagggtagttacttaatttaaaaaataaatgtggttactcgatttctttcaccacctaagaatcttcttcctcaattcaaatatgtatttatacaaaccaagaactaagcttttgtgagataaatagatgcaaattcatgtaaggagaattcatcaatagaaaggagaaaaaaatattacaaaattctccacatgaagaatcctctttctcaactcaaatatgcaattgcacagataagaaaataaaattagtatgctttggtgagattaaaaaaataagatgcagatttagataaagaagattcaaagagaaaggaggtagaagatgttgaaatttacaaagagaaaaaatgataaatgagagaaactaacttgaaatgagtggtgggtaatttataataaaccattccccaattcaaataaaatattcattagttgtagtcaaatgataattaagaatatacttattaattttcttttaatttatttttaaaattcatgattaaatatataaattctagtttgtttatcttgattaagaaacacaattgaaaatataatctaattaaaatccttcattattttccttttatatttctagttaatagttaattgtacataaatggtgattgaaaatatatttattactttccttttaatttgatttgattttaaatttatttaatgttatttcaaattatcttacacggatttaagttaatccaaattttttcttcttccaattatttgtgtatccacgaaatgcttctaattttaacataatatttatttatatttatatttatgaacaaaattatttattgattcaaattaatactttattgttgttctatcatattattagttagttgtacgtaagtgataattgaaaatatatttattactttcctttattaaattctgatatataaaattattaataaatcatgttcaattataaactaaaagttgacgagtttttaatataaaaaataatattatattaagcaaacatcaatcatttttataaaagagaaatgctaacattcctcttttataaaataaatgtagtatttaattattaatttttaatataaataaagattggtctggtttttaaattaattttttgatagaaaaataaaacaaaggtcttcaatttttaaatataaaaaaattgatgattttgtaaaaaaagttacaattaagaattaaaattttgttttaaaaaatgtattttaatataaaattattatttatttaagtataacctggaaatgtaaattacaaaatataaattttacatatcatgtttatttatttatttaatttattatttatttcaatttatatatgatgttttaaataaaaatataataattttatatctaaaattataattataataattatactataaaaactacttctataattatactttttatcctgaaaagaacaggaaaattaaaattattttgtcttaaaattatgagtcaaaaatatttcctttttaggataaaaaattacataatattattcttttatcctttaaaagagcggaaaaattgaagttacatatataccctcatttttactttatattattaaaacttacattgaagacatattaaaaatcgttataaaatgtattaatatagtttttttttctttacttttgagactttaaacagtgccaataaagcaacggttaacatatatgtaaaaaaaaatatttaaattaatattaaatgacttttactatataatatatataaaataaataaaaaattatcagattaaaaaatatttattacaaataaaaaaaaattatcctccgctccctttccttctaaaaccttaaaatacatacctgaatcattagagtgaccaaattgctacccctaacatttgtgaacacgataaacaaattatctgtctgaataatgatttataataattacaagaaaattctgatctaaaatatctttttcccttggccatttattttgtttccattggagcctatggattggcgtacggttagaaattgagatattcctacaaactgccaataattatatataactacatggacaagcaatgtttaagcctcagagataattaattccacaaatctagtgtgccccgagggccaatcattctaagaaagtgtcactctattctatattatattttgtagaataaggcttttttcaaggttggtgaatgggaatcgtggatctgcaataattgggacacatgccatgccccataagtgctacgattactaccaaccaaatatgaattaatctcacatagtagcatataataaagcatttc

SEQ ID NO: 277 - DNA, 3100 bp, Glycine max
cttctggaattcttattcatgtcctttgcaagttagttacagcttttataatggaggacccatgcttaaccatttacggttagctgttattgctaagccctaacaatatgaacaatatgtaactacctttcccgccacgttctacccacagcttgtaccccatttccccagcctttcctaccctagttgataaatgtcccaatgcttgggtaactgctttgtcctagctgagcatctttggtgcgtagcttcatcctcaacgtacgtatcagtaccacaattggttcaaccctaatgaattgagccacactaaaaacgatatatgcacacagaatgttctggtgacatacattccaaaaagcaagacgattaaggatttcaggggactttaatttgagacaatgacatgcatgtaacacaatgctgcacaagtggcattaactagtaagacagagcatgcatattaactaacgtgagattattctaatttagttagaaatctcaagtttaaattttaaatatgtaattattttaaggtcattattttgatgtgttttttttttttaaaattaaacttaatcatattacttgataaaataagtcacatgatattatgtgattcaacaatacataatacataaacgtaatttattttaaagtcacacaaaaataatgatttttatattaaatattcagagaaagagagttgaacttttccaatgtaacaatcatatttgactcatcaaaccggattgactctaataaagaataaatatcgtctatgctaaaaaagagtggcattgactagcaaaacgtgacattccataatggcgtggtttaagaagaaacgcgtggactcattgtttgacaacacgaaagatagttgaaagaaacattcgtaaccttaggttaatccacggttggtgtttatggttttccaatgggcaatgtggcaacgtaggacacataaatgaagaaagcccccctttgtgtgtgtggatgggctatgtgtggtttcaattttgatctgactcgctttcattatgatctggtctaaaaatactttgatgaaaatcttgggaacaaaatttgaaggatattttatccttttgattaacgttgtcaaattgtcgtccaaaaaaagttctgagcaccatgtcagaacatatccttatcaacgaaggagggaaaatccaagaatttcagcatcctttggcgatctatgtttgttctttcattaatttatacttcaatagtgacaaaaattagaagactctagagtagattggtcgaaagagattgatgataccgccaaacaagtttaattcttgcatgtcttttggattgctgctcttctgtaaatgaacttgctatatgacatgcaatgagactgaatatgctaaacatataatgagaataaatatgcatttatattttgtctccaatgaaagtgtttttttctttgtgtgtgtacaaagggggcaaaccgatatcgaaaagacactttcaataccatcgggttagatgccaatggcatattgaggttgctcgtagagatccacccaagtagttttatcctgttgtaaaccgcaagtaattttatcatgttgtagctactcaactaatctcggaagtcaaaaaatttccttgataaaggtttgctcaccaagcaagattttagtggctttaaggagaattggacccgcatccatggagaatgatatttaactcccaatcattgaccacttgtgtcaacttgcatttactctgaaagtgacctctaaaccagctacagtagtttcaaacatatgggcaatttctaattttccggaaaatgaaaggtgctttgataaaaatctgtctcagttactgaattttgcttatcaacttaccattgatttaatcctttcagtggctcttagcaagagtgaaaatgaaaatttatggtaatgtgcttggataaatagaaatgaaggcattaaatggaaatatgaaaaatgaaaaatgtgctaggagttttggactcaaaaaagtgtccagtgtccaataccttgtcaattttcaatcttctacttttcaccttctaattttcgatcactccatcaagctctaaaaagagcaactccacttttcccgtgaatgaaactatgaaagagatgtttgtgagcaaaggggaaagttacaagtttgcactttgatacctacaattttcagttttcattactgtggcactttcaacaagttaataatgtactttcatgcagaattttgttgtcaaaaacatgtcacttccgatattcacacaactattattttactacaggtggtgttgttattgttaaaattatggcgcttttgaataaatgaaaggaccaaccaatttttctgtttgtaagtccgccctattcaaaagtaacattggttcccactaagtagtccacattatatggttctcatatgcccctaagagcaatttgtggatttaatatttggaaaatgtgatgctctttttcctacataagcaccatgaaaattctattaccaatttttttctatgatgggaaaaatcaaaagtttttatttttccatcaatttacattcacctttcattgtaaaagaatatctagaagttaactagtcataaattaaccatatctgaaaaagtggaccctgacccaggaatacaatgcctgaaacctgtggaggaacaaatagattgatcaacctaattgctctagaagttcaatattttaaaaatacatacgcataaatagaaaatctgccaaatctattataacacaaacttcttcctttaatgcataccattttgcaagccattctattttaatcttaaaaagatataagcactaacatcaaaagctatgcttatgtaaaaagttgtgtgtttccttcgaccgcaacatcatcatatgttctttagttctgctagcttagttaaattcaaataaacattatagtccatatggaatctagaagaaacgacaaaccaccattagtgttgtcagaccctaatttcatctaggaaatatcgttcgatatgatattttgattcttgttagtcgaattacgatatttggcg

SEQ ID NO: 278 - DNA, 4000 bp, Glycine max
tggtgctttcttcaaaccatatagagtcgttttcaatctgtagacatggttaggatgttcatagtccaaaaaacctggtggttggtctacatacacttcttcttcaatgcgaccgttgaggaaggcattttttacatccatctgaaaaagtttgaaatccgtgatgcatgcaaatacaaacagcaatcttatagcttctaaccttgcaactggaatgtagatttcatcatagtcaattccttcttcttggttgtatcattttgcaaccaattttgctttattccttactatgaagggtggcattaaaccggttaattagtgctatttagattattataaatatcaataaataaaattataaaatttgcttgaaaaaggtgaagtgttaaacattatatatatatagaggatatatcatatgagagaaaattatcttatatgaaagtgattttaaccatataatcaaacatggatgatcaaaatttaacgagaaccatcaatttcaaccattggatctcaacaaaaaaaattaaaagataatattaaaatctaactattaaaaattcataaattaaaagataatattaaaatctaactattaaaaattcattgtccagttcatcctctccttcccttgctcatcttataatggttgccgacacaccattctaccacatcagatgcatgatgcctctacgttcaaatagggttgtttaattcgaaccgaactgaattgaactgtggcaaattgttcaagcaaattgaactgaactgttttagaggcggttcaaaatgaactaaaccgattgaattgctctccaaactatttcgaatttatctgaattgttctaaaatgcttcaaactattccaaattattccgaattgctccaaactatttttaaggatcatttgtcttgaaaacattcacgagaagaaaatgtttttttattaatttctattttaaatactccaacatataaaaaatatcactttttctggatattaacattttcctctcctaaaaaaataatattaagatttagtttttttttcttcaaatattaacatttagttgatccaacttattgtgtagtttgatgaatgcaaaagtacagtttaggtgcatagttaagcgggaaaaaaaatgaataaaaaaggggtcgaattcaaccattaatggttgtgttactttactaactgataacataaagacataaaaggaataaggaaggggaatcaactgatctataacacggacacaatttgaaagtggacgctgtcacatgatttaaatttttttaagcagttttcattttggttccaattcagttaactgttaatttagagacaattctcattttaattcatagttcaattaattgttaatttaaaaacagttcagatttttgaagttgaactgtacaacaattcagattaatttttattgaaaaaaaaaatcaactattttttatcagttcaattcaattcagcatcggtttagttgaattcaatttttttcccacccctacttacagataatgtggatcaagtgtttgtgttcgaacaagcatcctgatgataaggcgagcaaatattctgcgtattggtttttatatcctttctacctgtgccttttgcaatattgggttttgggaattataattttataaagtcaaaatcaatcataataaagtgttttatatgcgcggtagttgaaaaactgaagcaatttgcttttatctagatcgatacttgtatcaaaatcgaatccaggccaaattaatggaagcatggatcaaaaacaatgaaccatttattcatatcatcgaatgctcactatatatcacatgaactcggaaagggttagatattcccaatacgcggtcactgcattttttcttttaagttaacattcaattgaaaggttggatacgtgatttttccaatgtttggagaaggagaagatagcatatgacctacttaatgaaccgtttaatctcagcggttaattttttaaaattataatctaacgattaaaatcaattatttttattttttattttaaaatttttttcatttgaaatatctcacatatacatatataattattatactataaaatatgatttttatccatccagccattgaattatatctatttattattcaaattatttgtgtcaaattttatcaaaattgaacaacaataaaaagatgatcaaaggatcaatattttgaaaattttatattatgttaattttaatttgtatgaatgagtaacaaataattttatattaatataaatttttttatatataatctatctgaaaggaactttcaatccaattataaattttaacattattcaattgaaaattattgaataatataataatttatcaaagttatacatatgtaatttgactctctctctgcaaaaggtttaatcataatttgtactaaaaaatttaatgttcaatcaaaaagaatgcagaactagaagaaaaaaagtataatttaactccatatcataaaaataaaaagtgggaatttaaaggaaaatacttccaagtttattccttagttctgaatttttttacatattttaaaatcttaaataaggagaatattcgctcccttagactagtgcataacaacattcaagtaatttcattaatcaatcaattcaaacgtacattccctccctgaataacaaaaaatacattccgcttaatgatgaaaattaactcattcaaaggatataatgtttgcaactagagctacttaagaattttacctgccaaagcatatgatgtgaaaatttttaggatatttaaaaatcaaaaagaaaattgttccgttctggagctttcgttatcgttgtgagagaaaggaggttgctacttgcacagaatccaacatccaagttagttcttagcaaagtaacgactagttattgtggaaagaatgtacatgaaaaatggggttgtcagtaaattggagaagaggcttatttaggtgtcttatactcttatacggaagacccataaaaaatatttgagtgatttcaaggattaaatttttgggtaatcaagtgtaggactataaactatataggtgatgagcacaaccaaggttaaaccacttttcgattggtgttctagtggtcggcaatcaactgatcaggctatggaccttcaaaagtatgtttattttatacttgaaaatgttataaataaacgtaaaagtaaagatcttgatttgttaattaaaaaattgtctcaaatttaattttaaaacgaaaccttaaacatattctattccgactaacgtggttagtggataagttgtgcctgaataggattatctagatgaacctccgttctaggacaaacccttgtatatgaccttcaacagtcctatcaatcaatagaaaagttaatccaccggtgaacaacaatgcaaaaacaaaataaattcttagttgaatgaccaacaaatagtattaaatcgacaaaatgcatatatatatatatataaaattcaatcatagatttgcatttgcatgtatagtaaggtttttaatttttgtaataactattttgaaaattatatctaaattgtcggtgtaaatttttgtaccaacaacgtatgaaactaaactaaaaaaactacataattttttcttacagaatccttcaattttgttaaaacattactgggtaaatagtttattagcgcaacttcaattgatattatatatctacagtgatagactataatctcattccctgtttgacattccacatgacaaataacttgcagaactacggccaagtttgtgctattattattgtttttataaattaaaaatcaacgtttactttttaaaacattgaaaaaagtgtataataattagcttattcgaaagaaaaaaatctcaagaaacgattttataactataaaataaactagattatttaacttcaaaacataatc

SEQ ID NO: 279 - DNA, 4314 bp, Glycine max
acattaaaatgagacgcgacttacatttttacatttatttttaatttaaaatctttatttttatttatttttatttcattttaaaaaacatacactaattaaggataaaatataagtataattatattttattaatttacatgataaagatacaaataacttatcaaaagagaattctaattctgatttaaaaatagcacttcctttcccttctcataaaaaataacggtaaatatatttaaaatttttataaaatttgaaaaatattaatttaatattcattaaaaaaagttattaatttggtcctataaaaatataacataactttgttgaccctttcactagatgataatctgatgtgattaatggacttatattaattacaaatgaattaaataatttgtgactgttaaaatcttctcaaataaattaaaaaaaaaattatcagcttataacttttcaaaaatataatttttttctctttttagacgatattctcacacgggtgaaattaggaaaaaaaaggaagtaatagtgagttctcaactttttatatcttttaaatgtgcttaaaaaagttaaaagagaaataatcaagtttatcagtgacctctaacaatcatctaacgaatttactattaacaaccaataaaaatatattttattttccgaaagaccaaatcaatacaaaaaaaaattatgagaataaaattaatacttttaaaatttttacaggtatccaaaatatattttacccaaaaataacacttccttcgttctataataaatataatataaaaagtatataatatgtctcaaaataagtggcataatatttctttaaatgttattgtagtgttgcatggtttcttactaggaaaataaataataaggttatctttatgatatttttgtattttattgcttatttattaaattttttatctgtataaaacgatctaacacaatactaattatgtgacgaaatgagttcaaagttaaaatcttaaaatatgtatttttaaacttcaactagtaatcttaaaagtattagtttccacttatttgatttaatcataataaaattgttatgaaattataaaataaaaaggattaaataaggacaacaaaatagttaagaaattataaaataaaattgttatgatttaatcataatttacactaaatgattaaaggatcttgctaactcaatttgaagttactagttaagaaatttaaaatattttttatttattgaaattcaccttagaaatgaattgaaagacacaaaagaagtacattaatgacatttttaatgaattttttattttaattttcttaattaatatcctaagagtaattattaagatctggcaggattaaataaggacaatccataccttaagtgatctataaactctttattttttttaaaaaatgtttaaaattaaaaataaaataaaaggttttgacattagttcttttgagattgtgaggagttttttttttttttacttggtcaagttttaagttactttttaatataaaaaaatgacatacaaatatcccaataacaagagttattctaactaggttgacgctacaaagtctgatcatgatatgcggtacgccaaagagatataattaacaaaaagcaaaaaggagatatgcaaaaaataccgtgggatgtaaactgaacccatgatgagcacaacaaaatagctatttaaatctatagttttggagacttatatatttctagacggatcctatcgtgtacaagtgaatcaagtgcggcatgaaccacaaattttttaagagccatgagatatgatgtcaaaaaatgatgtaccagatgcaataacttaccatggtccatggggatgtggtatcttatcatttaagtgtttatctggttttatttttagcacttgacccgtgaatttagaaataaaaaagaaaatacatttttacgtgattttaagtaaattgttcattttatgtataatttacttgtttttattaaaaaaatatctatgtgctatattttatttttaatatattgacatataaatattaatgtaagaaaattaaaatttgttcaaataaaaaaaatcttgaataatttcttaaagtgagaaaataattaataaaaaataattctggacactaattttgtttgaaaaataatagtgactaacttaatttaattttttttattatcatgatattagttaggaatatccagtttagtgcataattaatcttggagaattgactaatcatatttagtataatattactttttaaccatattttttatccctaaaattcaaactcgagaccttgtttaagtttatttaatttaatttttgttatgtgattaaattaatattgattatgtaaaagaaatttataattttgattggtaaataatttttagtaaaaaagtttatttccgtgaattaagtgtaatttttcctacttatttttataaaatatatttatgacatgtgttatattttacatattttatcaattaatttggtcttcttattttttaaaggttcaatttaatcccttaatttatttattaggttcaatttggtttctttatttttaaaatgtttaattagatcctttattttttaaaatgggttcaatttgaaggttttttttttttttcatcttcggacattttcaaaaaataaagaacataattaaaagatttaaaaataaaagatcaaattaaactcaataaataaattaagtgatcaaattaacattttaagaatggcttaattacccaataggttcctttgtttatttaaaatacttaattgagccctcttatttttcaattagatcctttattttcaaaattgacataattgaattatttctatccaattaagttggcgttcgttagatgatgagtattaactgttatcaattatgaatagtaacatataattgcctttattcataattgataaccacaatttatcccataacacacttaacttaattggacaaaaatgactcaattgtatcaattttaaaaacaaataacctaattgcatagtaaaaaaaaaacaagagggcccaattacatattttaaataaaggatctagtattagataattgagtcttttaagaataaaaagatcaaattaaacttaaaatataaattaaaagatccaaataataattaaatcataaatatatttatcatttgttgtatttttttcatactttctatgttcatagcataaatcattcaataaattatttaagttagcaaagagaaaaccataaaaaatacatttaaatttaaattattttactataaataaaaaattataatttcatcatattaaattaaatatattttaaagataattttattaaataagataaaattagttaagatttttttataaccgagaaaaaaataagaaatttatgttgtttatatttgaattcagagacagtaataggaatgaatatttattttaataaaagcaagtaacttttttatagttattttacatagataaacaattaacttaaaatcatatcgaaaatgtatttcctcttttatttctaaatccacatgtcaactgttaaaagcaaaactaacataaacactgaaacaagtcttttcgtgataagttattgcatctagtacatccattttttgggcatcctgttgcatggtcttaaaaaacttgtgcatcgtgtcacttgtgcacggtagaatcgtcatatttctattaaattctcaggagacaaaagagggaacagaaccattgaaagaagaggcataaaagacaaaaatatttgcataagtattgtcttctaaaaaaatatgcccaactaaaaactgtattttcttagttatttgattgcagttaatccaaaaaaaattggaagggccaaaatactcacagtcataatgtataaattaaaaataaagaatatatttttagttcctacaattattgaaatattggttttgattagtataagaaatttattggtgttaagtccctacattaacctaaaatagtgtgattaagctcttattattaaggattgaaacataattttttttataaaaaagtaagtatttaaaatgtacaaactttttacggggactaaaaatatttatttttttacaaggactgaaatcaatactttaacatattttgagggacaaaatatatattttactctaagttaaaggtaacaattttgataatatatcctttatcaatgattttaagcattgaatgatattcaaatttcaa

SEQ ID NO: 280 - DNA, 5000 bp, Glycine max
ctaactaaccaaataatattttcatactaactaatctaaccttggagtatctattaatacataaaaattaagaacaaaatacctattaatactaactaacctaaacttagaatacctattaatattaacagaatatataaatcttatttactaaaatcacttaccaggaattatggactacaaaggccacacacgaaacttcaaggaagcacacgaaccacacactgaaggagaaaaggagctcaacaactacaacttggagaagtgtagttaaattactatgatggagtctttttttataggagaaaacgtaaaggaagcaatgctaaccctctgcattttcacgttcaaaaacactgcattttcacgttcaccctagccctgaagacactgcaagccctagcctgaaaacactgcaaccctactcactgcaaaagcactgtgcatgctaaagcttgggagaggcgagacggtgactccacgtcagactcgctatcaccaatggcggtactatcttcacgtgagcttctcgccagtgggagcaacgagacagcttccacgtcagctgtctcgccattgacaatggcggcaccctccacgtcaccaagtttctcgccattgacaatggcggctagcgtttctcgccactactgctggcgacatccatggtaaaacagaccctgcttgtaaatactttgaaaaaagactctctttagtaattagtttataaatggacccctctgtggtaaatttgtccaaataatatcaattcactagcaactggttcatttgactatattaacatatctcgacctttagataaagtaaaatagcaaataactaagtattttgtcataacttagttgaatacaaaacatcttccttggctagtttgaaagcgcgactactttcgtaagatgcgaggttcagggcagcatgtggttctacctgcacaatagcacattatattgtcatatgtcttaagcttgtcaaatgttcataattcatgaaattagaaacgctttaaggatcttgaaataacaaacttcagaacctgttgttacaattagcatatcctttcgagcataagcatcaatatcttctactttcaccttattagaaataagaaaattcagggcaagagaaatgagactcacaaaagctgttataaatattaggttaaagatgaatagttttcacataaaattagaaacacaaagggcacatgaataaaaaagtaaactagcagtaattgtccaaatagcatgaaaatgaattagattcatacagtcaagcaaacagttattagctcagaggttattaaagtagcgaataaatatttcattgaaattctaacaaagaataaaaatgcaaagattgatatatgtcaaaaaatcacttggccataaagctcaagctagtaaagtaaaacaaggcccaggaataatactcttcataattttaacaccatatagcatgaaagtttactagtcctgaaagcaggtacttaaacttaaaagtccaaagtggatatactggaagatgagttttgaattcattgataaaggaaggagggccaagtacctaaccatagtagatattccaaatttaaaaagtctattagcaaagaaatacaaataaaaatttgaaaaagtggaaacatgttatccttggagtagttctaccagcactggccatgaaaaggcatattaagctcaatgggagctgctatctaggaaccactcagagaacaccacaaaccttaatagttagtatacattgacctctagggaactgctaattactaccatattaaaccctcttggtcttcaaaccgttaatgttaaattcaaggaataagatcaagataaatgatttaaaaccaagaacgagtagcaaatatcccggtgacttacaatgctactccttctttagagagttcctttaaagcttcatgatcaaaaacactaataactaagtattttttcataccttagctgaataattaaggtaactttgagtctttgactgtttttaaggttgattaagaagaaatgaatagattattatccgaagaaattctcaagaaaatacaatattgaaatacacattattattattattatttgttttacacatgccattattatacaaaaaagcaggacttatatgggaagtctagagttatactaacttgagagaccacttcaaattatgtatttcatccttaatgaggtcccgctcactcctcaaaaattaaagttcctgcacagggctattcatgtaaaaatctcccttgatgcaagttatcatgtcagaagtatgcaaaagaaaacctcatttaaaatgtgagaagtccacataaaaatactttataccagacttaagctgataattttctctatttttatctttaatgaagtaaagccttattataaaaaaaactaatcatagaaaaaaaaaacaataagcaccttgcgggtatccctagattcccagaggagtttaacccccttgtcaagctcttagattacaagcattgttctccatcctgccattgagcgcatcgcatcaaaatcaaacttaatttaaagcaacatctagaaatataagtgaatttcaaatggactagtaacaactggtttctaaacataaacaagtattccattaacttgttaaagattccatcaatgtctattttatcaattacgtttccagttattatttcccctcctacaatcataactacattttatcaccaaaatttataggtagattgaacacaaatgcaaaatccatttatcagaatagttaaaaggattaataccaataacctttttttgctgcatcatatatatgcataaatgtgatccccaacatagagaatctgcatataaagcatccaaattcttacaggaagcttcagtttagtgacaatcttcaagtgtacatgaatcctaaataacatctacttaaaagtaataaactctttaaaccagaaaatcccatgacacaaccaagcagccgtttgtgggagatgaggtttgtctcgttgatatggtccttgcggccatttgcacatgaataaataaaaccacagcgctgcgaacccttcacaaacggcggcaacagagtgatttgcggtgccaattttggggtgttagggtggagctgtgccttttggtgtgggagggtggcggtagggtgggtgttaggaattttcaataaatcttataaaatatcaaatgagcaccataacacattacattacgttagatcatcaagagagaggtttcaaggaatacctggatccatagagtttgattaacacgcagtgaaatcttacaacggtcacaaacaattggtttaatgaccttcctaaaccaaatcaccttattccttatgggaccttcgttttctcttcagacggggagagaagaaattgtttattgatttggtgtattgggaaccataaccatgtcttatgttttaaacctattagagttctcattatccccgtccatatcaatttttttgacagtctaatagactcacttaaatagatcactttatattgaatccatttaaatgtaaataactaatataaatgttataatataatatgtagttcatattaattaattaggaattataaaatttctaacaatcactttttttttaaacggatctcatataatgatttaaaaagcggttgtaaattgtgttttcattaaaaggtatgataattaatatatttctaacatcaaggacagttcaacttgaaatgctgatctttcaatgtatcagaaaaaatgtatagcagcatctgcaattttgcataacgttgccaatgactagaaattgacctctttcaaaagattgaaatttccaaagtgaagcctataccaacaaagtatttcagattgctgctagaaatttcactccaatcagcatgtttaaaggaccaccgtgatgaactttgttggttccacttttatacaggattcaagagtaacaaaaaccttaaggaagcatattagatggcactattttaaccatcagtattacaatgacaatgtaggccaaaatacaatatgaaaaaagagagaaaaggaactatatattgcttaataattatgattcatgccacacctaagaattgctagcagttacataactctctcgtctcccaaattccttcgcagggtcgagggcgctgggataagcaaactttttaagatcatcttcactttgcatggaattcattgtgatagacaaggccagagccacttactcaacggtttttacaatcaccatttttcacgtagctttttaggatcatttgattcacatagctgctccaattctctcaccacctcatccatatttcacctgtatttggactctacaacaagacattgaaaagttagggtgactgctctttgagcttggttaagggaatactgttcttcaatacgactatccattacgtgaaaagctttgtgttagaaagagctactccaaaactataaacatcactcttggtagtgaggtgacctagtaaaaatggaaaaagaatcagttactcataaaaaattgctatggacaacctccttgtttgtatattatattctagaaactaagtgtcgcttcaatcaaattgttctacttttgtgctgaaagtgttggctccatttttttttacctttctttcattttttatctgttcttcattcttttttcttcttttatctttcatttactttctattttattttatcaagaaaatcaaactatcgttaattctccattcatttttgtttctccagtacgtcattcgtttcaaattcattcttgctgtttgtattcattttgtttctttgctccacctgttagtctcctaccttatttctccattttatgatttgctctagtattaattgtacctaaaattagtcccattagcccaaatggtcaaaatcttactcaaacttgcaaat

SEQ ID NO: 281 - DNA, 3430 bp, Glycine max
ttattttagaatgtaatgaggaatacaatacgccaaaaagatgtctactcacagacgagacagggtataatatacaaaatacaacttttgaaacttaaaagagtaagggtgttctcagttcacgtaactcatgaacctgaaccaactaaagcaatatttaagttttaagcagtcactttagtccctgaaaataaaatgtaaccagatgataaaactcattaattcttttattgggtgatcaagcctactctgttcttaccctctttcatattaaaacaccaacaccttttccaatcaatcggatacctcttcttcctcttgtgcagcccctactcgttcctctcctcttagagaagcccttcctctcataaacaacataaaatagaagaaaaatgaatcctcaaacggtgttgaagaagttgaagaggaaggacaaaacaaaagggacatacaacaaaaacattgtattattattaattaatagtattaatatgttaatataaaaccataaacatgtggttcaaaataagaacacgcggcacctttacatcccagatgactaagggttttgttggcagatgttgaagctgcaagcaagctgcccctcgtccgtgtgttgctatcgataaaggcaaaataaaagcccctacctaccagcaaaacaaaaaccttgtcttcgcaatgccattcattacacattttcaagcaagcaacactagggcatgggtacttactagttcgtacaatacgaccgcggcacggcacaccttgaacagggcttagtgatgggtcacagagttttcttcgacaaggcttagtgatgatgggtcacaaagttctccttcaacacttggtgaagaccaaaggggatgctggagttgtctttgaacacgacattagacgctgggtcaacagtggaaagggatggatgtaaaggaataatccctaatttgagggaaataaaacaaaggcggctttggtccaaacccgtcgttgaattttttttcttatatttacaaaaatgccacccaacaacttcctaagacggttatttataaccgccttagaatttacgtagtaaaaaattattctcagcttttataattacaaatttgtcactgcgccactatctaaggcggttctggataaccgacttagatagtacgtcgtaaaaaagcattattctagtagtgatatcaatgtccaaatttcatatgttaaatttaatgatattttagcattgaaggaaaatgttatgtgatgatgttctctataaactgtagatatactatttttttattttgttgccttggtcctatatgtacactatttatgactattaaatataggattaggtaaacataaagagtacgtggttagaaatatatattactttaattaatattaaattttgtaatattaatttatacaaatgtctttatgatgaatatattcttttgtgcatgtagggaagtttggttggaagagttcactcgaatcacgcacgcttccgttaatcaagcaagggtatgttatacttgatttattgttaaacaaatctttcttggcttaaatatctaatgtgttagatgagttataccagaagatgattttatttatacttcttttaatttgagcaacctgcatggtaacaattatgagaattgactacaaatttgtcgaatttttccctcttttttccttgtcaaataggccgataggaaacccgcatcacctgtcacgtacgtggatctataatcaaatacaaaattttcttatttgtccttcattttgattacaaaaataaacatttgacaaattctaatggaaaaataaaaatgaaaaaaatatcatataaaaatagagaaattatttaaaaccttttaattaattttaaaatatgtttaatattctttaatactagttaaccagaccctttgatggaatcataaaatagaattttctcaacaaaaatccaaacgtacacatataattgtttaaactcataatttattgtgagaaaattaaattttctaaataaatgcaatatgcgaaattcaagagcatggttctgaattgaggtcgtggttgtgattgcggttgtggatgtagattgcaattgttgcgacgtaaaattattatatgtttggattgaatatgaaaaatgaattttataattattctaattattggtgtatcttttatctataagataacataacttttcattaattttaagatttagtatcccacatcccaatagttcatacccattcaaccattgatacttagaagttcaaatagaagattaaagtttgaatcattattttttttgacaaaaaaggtggaatagaacaatgtaaaggttctgttgagacttcaatgtgattcattgcagctatgttgcggcatttcgcgtgattgaaattcaaactacaattataggttgatgtggttccaggcaccaattcaacaataatattgcggctgcagttgtggttgcaagccgtaatttagaaccttggtcaagagatacactccaagtggaatgtatgttgactaatagagaactctagtaccataatgagaggataggtgaagaaatgagatgattaaggtttactaaatctcattcatgaatgaagtcattcacctttgctaaataaaagggtcttctgaaaaagatgaaccatcctaactaatgcaagaatagaaagccacttgggtgagagagtatattgtagtgagaatacattatcattttttgtaatagtgttgggtaattaatacttttacaaacaaaattacccacacctacaaagtatcatcaaaacacaataaatattagaccgtaggaaaaataataacaaatataagaatttaacgtgattcggcacctcttgccttcattcacggaaccatctcaaaaatatttccctattataaaatgattacaagattgtaacttaacctcaaatagtgtatcactctacaaacctgagtaccccactcaatggttgcaagaaatgataacactctcacacaagacatttttctctcaacaaagtgattttattttgtaatctctgttctcacatgctctctcttcgtgtgtttcctctatgctaattcttttctttatttatagtgaagattgttaccaactataataaataaattcttttggaagttgaaataaaaataactttcaatgcatccttcaaataaggttcatctagtaaaatgcaatcttccactttatatttaaaccacctaaaccttagtggtaaaagtttaattccccatatgcattaaatgcatcttatcttttgacttaaaagtctacaatatattatgacatgctagttgttggtttatctagatacacaagaataaggttatattccaaaatttgtttccaaatatttct

SEQ ID NO: 282 - DNA, 2990 bp, Glycine max
taacactctcacacaagacatttttctctcaacaaagtgattttattttgtaatctctgttctcacatgctctctcttcgtgtgtttcctctatgctaattcttttctttatttatagtgaagattgttaccaactataataaataaattcttttggaagttgaaataaaaataactttcaatgcatccttcaaataaggttcatctagtaaaatgcaatcttccactttatatttaaaccacctaaaccttagtggtaaaagtttaattccccatatgcattaaatgcatcttatcttttgacttaaaagtctacaatatattatgacatgctagttgttggtttatctagatacacaagaataaggttatattccaaaatttgtttccaaatatttcttcagttctgctgcatacacaaggtatctcgtggacctggtttatatataagactccttttaccagtggcgtaacttttgccaattggtgtagtcctgtggactgtttgcatatggtctattagaaaatttattagcttttcttccgccttcatttatactttgccaataaaaacatagaatctttactctttattttagaatttaattataatgcattggtatctacatatattatataaatgttcataaaatgttttttaatcactgtccatcaaaattaaactcatatttttttgagttaccagtataacggataaaataacttttttccatgggaattgttaggtgcatcttgtacaatttctcgtgcatccagtcttttaagtgaagtgacaacattatccttcacttaaaattttaaaaatttctccctctccctatgttgtgctatatattgtgcttccctcttcttcattctttgcttcttctcacctcgccgccgcagtttgtgcctctgtttgcgcattcctgtcaattcctacactgttgtcgcgttcaccttcaccgtaagtccctcttttccactccttgattgaaaatgagattacatagccattatacgcataatccgtataatccatacgaattatcaatccgtatacattacatggattctcaatccacataattacttttttatttattaattaataaataaataattgaataaactattattacttaaaataaattaatatttttgttgttataatatttagttaataaattcatattgttgtatatttttaatatgtattatttaattagtcatatttcttttttgaagttggtttttaatgattaattaattcgataaataattaatttatgaattttttatttaaaaatgaatgtataaatattattgttatttatttatttttaaaatataagtaatttaattatatttgatatttaaaatagtttttttataaatttgttaaatataaaaaattccaattttttataagtatatattgtacaatttagtttaacaagaaaatctaatattttatatgacaaactttttttattcatatagttgtataaatattagtacactaataatgtttgggattataaaattaaaatttcttcatttgtttataaatatttaaaagtactcaaatactgatttgtaaaaaaataaatagttatttattagaaataaaaaataagtttgtatttagattttcatcatatattttagtttactagaattagtaatgtgttgtttataaattttaaaaaagaatttctatattgatttatgaatatataaaagtattaaaaagttatttaaaaaataataataaaatatttctttatgaattattaaatagtaatttattaaatattttaaatcaaatttatttattagtcaatttcttagttagtttatgaaactcaactattatttgaatgatgacattaattaattgttatgactgtttaaatttgtagattatggcttgaaccagaggattgtgtcgtgctttaggcggagttgtaggaagagccttaaggacacaagttagtggtgatgtggaagaagcctctcagcgttgaaggctgatagcatctgcacataggcaaagagcaactgtagctattcctgaggatgttgagcatgtggataatctagctgacgaggttcataagcaacctcaggagccagttactgatgatgtacttgctaatgcccagggttttccaggcaggccccataatacatcagttttgatatattatgtatatcatgtggcagccatagtttgggtaagagaggtacttattacttgaattatataatatttgaataactatttttcatttaacctgaagtaattacattttttcttaggagtgtcctaagttgaagttgtcctctcatgggagaaaggtgcaaaatttttgaaggcctacaccaaagattgaaggtataatagctgccacaggattaagtttttttattgcatgttccttggacactagtgacagggaacttatatctggttttgcaaagagatggcacaaagaaactagtagtttccatcttccggtaggaaaggtcactatcaccctcgatgatgtggccttcttgctacatctgcccattataggcgtcttccataactttgatgctcctgacgcagaacatgttgtggagctgctagttgagttgctcgaagtgaatacagaaaatgaaagagatgagacattccaaaccagatggacatatgttcagctagcctaactgtgagacatttatcgtagcaaatgtgacataggacagtggaccgtagcaactcgagaatattttttgcatctagttggttgcacactgtttgctaacaagggtgcgacacacatgcatgtggtattcttggacgcatttcgtgacttcagccaatttggaagctattcatggggagctgctgcattggtccatatgtatgataatttgaatgatgcatcaaagaaatccactaggcaacttgcaggatatatcacattgttacaggtatt

SEQ ID NO: 283 - DNA, 21 bp, Glycine max
tgcaagcatcttctgtggcat

SEQ ID NO: 284 - DNA, 21 bp, Glycine max
ggaacgtttctacgcttcgta

SEQ ID NO: 285 - DNA, 21 bp, Glycine max
acagcatgagaagtacctcgt

SEQ ID NO: 286 - DNA, 21 bp, Glycine max
acttacacgtggcagtttcaa

SEQ ID NO: 287 - DNA, 21 bp, Glycine max
atcacaccgtgaatgcattca

SEQ ID NO: 288 - DNA, 22 bp, Glycine max
aggatgatccagaatgctagct

SEQ ID NO: 289 - DNA, 21 bp, Glycine max
tctcctgtgccacaacatcct

SEQ ID NO: 290 - DNA, 21 bp, Glycine max
acaacaccgcgtcacaatcat

SEQ ID NO: 291 - DNA, 21 bp, Glycine max
agtgcacctagcaacactcca

SEQ ID NO: 292 - DNA, 21 bp, Glycine max
aatgcgaagtgatggcaagca

SEQ ID NO: 293 - DNA, 990 bp, Zea mays
catcagaccataggacgacagtcaggcgggtgtcacgggtggcgaatccactactcaccacattggtgccctcggacccctgctcgacagactcgaagagaaagctgggcgcatcgcgttcgtcctccttaacgagacagcggtacgctagcacgggcgtgaggtgatcggagaagatgcacctcgtgagcggcagcaggttgcggccctccgccgccgccgtccggaacctggactcctcctccctcaccgctgcgcgcgcgcacacgagaaacgagaccgtacctcgacggcattaatagttaaccaaaactgcagcacgcccggtcccaatccggcggaacagacacggcctcggatcgaggcacaggcactcaccgacggcgtcgagctggtggaacgtggcggtggtggcgcggcaggtgacgccggcggccccccggcggcggaggctcagcgggcgcgaggacggcgcgaggcgcagcgagagcgcgaggctggcggtggccatggactgcggcctgcgggcgggatgacacgaacacgagtgcgcggtgaggagggttgttgagggggacgagcgggaatggatatagataggggcggggcggggcggggcgcgagggaggagcacgcgggcggcgggcgcgggcgagtggagtggagtggagtggagtcggggagggcgaggcgcgacacgtcgcggccaggcctggcattcaggcgtgggccccctcgtgctccgccaaagaatgctgtgttgtgctgctctgcccacgaggtttgaaactgctcgcatcgcatgcttgtgccaaggtctacagctatatgttgtcacatccttctctgccatataatgacatctttggcatgacgagcagcaaacggcgtgtgtttcgcgagaaagaagacgatcgatcacgtgtgcaagtgcgccacgctagacaacagaaacggttcggcatgcacacgtgagctggcacgaacgta

SEQ ID NO: 294 - DNA, 530 bp, Zea mays
gcatatcaactttatgatggagactgtttatctttcatgagctttttagagaatttccacaattcacagatcacgaccaacgtcaacccataccctgcaggacgatatctcatatataagccccaaacacattaagacaaaaaacattctaccttacagaccatagagtattacatcttcactagatagtgtaacataatgtgtactcttgttacatatacaagttttttctagagtcccaacacgttggatctcctatcataacgtttggtttgctaccgtgcgtaatccaggtgggtctcaaactcatctccttaatgcattatctatcatgtttcaagataaacctttcgtaaatggatctgctggatttttagccatgtttacataattaggaactgtcaatccagaggtcatgcaacatcgatgagtctactgagattgattatttctcgtatattttggggagaatgtcatcttattatatctaggagtatgctctcgtgattactgaaatgttttggtggtta

SEQ ID NO: 295 - DNA, 19 bp, Zea mays
tactgatccatgtcagcta

SEQ ID NO: 296 - DNA, 19 bp, Zea mays
tagcgtgttatcccgtcct

SEQ ID NO: 297 - DNA, 19 bp, Zea mays
tgcgcctgcacgagctggc

SEQ ID NO: 298 - DNA, 19 bp, Zea mays
tggcttctcctgtcgtcat

SEQ ID NO: 299 - DNA, 2001 bp, Zea mays
catgccgatgttagaggtggaagcatcaaagggcgcgcgacatcgagagctctctcgagattggttgtttcttgtaattttagagaaaatgaactttctattatataggggggacaacctttgtgattacccattacctttcattataggactaaacttcccatgatttattgactcatacacgaatggatatttgagatttattctatgaattacttggaggaatgtgggggccaaagaccagataatttcaacaatcctccaccaaatctcgaaagcaacacttaatcggctctcaagaagtcctcaagtaccgtttggcatatcaactttatgatggagactgtttatctttcatgagctttttagagaatttccacaattcacagatcacgaccaacgtcaacccataccctgcaggacgatatctcatatataagccccaaacacattaagacaaaaaacattctaccttacagaccatagagtattacatcttcactagatagtgtaacataatgtgtactcttgttacatatacaagttttttctagagtcccaacacgttggatctcctatcataacgtttggtttgctaccgtgcgtaatccaggtgggtctcaaactcatctccttaatgcattatctatcatgtttcaagataaacctttcgtaaatggatctgctggatttttagccatgtttacataattaggaactgtcaatccagaggtcatgcaacatcgatgagtctactgagattgattatttctcgtatattttggggagaatgtcatcttattatatctaggagtatgctctcgtgattactgaaatgttttggtggttagatgctcaacacatattgttttggttgatataagctaagtgtcaagagatgcaaatggaaaaaagcaaggtatgactctagctttagtaaattgtttttggtactaacattattctactaagtgcaaagaaccttgtcaaatcgagaaaatcggattggagaagtttggctaagtccagccaaacttgcaccagctcgcggtgcaccagactgtgtctggtgcccaggctggcgctccggtgaactagccgatctcgggaaaatctgagggcgtcgcggctataattcactggactgtccggtgagccagccgcgcccacgccaacggtcggccgcgcgatcagcgggcgacacgtgggcttcgccaacggtcaccaggtcgcaccagactgtccggtatgccacgggggtcggtggctgcaacagtcaacttcgtcagaaaaggaaggaaatcacgcactattcactgtccggtgcgcccatagacaccaggcaactaaagctttccaaatagagttcaaacggatcctagctaccttggggctataaaagggactcataggcgcatggagcagtacaccaagcacccattgaacattctaagacgccaagacttcgcatacacgtatttggttcatcatgatagtgaatcgagcacttctttgagttgtgactatgatgtgatgcttttgtgtgctcgttcttgtcttgtgtgcgtgttgttgctacactctcgctcttgtgtgttttgctattccccccttactcttgtgctcattcgagatcatttgtgtaaggtgtgagagactccgaagtgtggagattcctcacaacggtatattattgagataaatagaatcatggtattcaagttgatttttggatcacttgagaggggttgagtgcaaccctcgtccattgggacgccacaacgtggagtagccaactattctacttaatcgaaccacgggataaaatcgttgtgtcaaatgtctttctgagcaagtagatccaacgggagagtgcagagagtgtttgcaaagttccacggggaatgacaatagctctgttaatctggcctctcaagggcactgtacggtggtatttataggcacccgagtgaccaccgtcctctggtaagaacgtttatg

SEQ ID NO: 300 - DNA, 2640 bp, Zea mays
gtttataatcccaaattcctataaatccaagacagatgtttttgccaaccaagccaaatttacaacacagtaacacattttggtggacaaaattggaatattcataccatggcagcaataaaaacagatcagggaactccattttcaacagaaagaaagcaaagaagaaaatttcgagaaaacaagtttactcagtgtatgcacctcatcattgaaaatgattgccgttggtcataagccaatagtatagattgcatcaagaataggaacaaaactaataaaccaaaggaaaaataccatcaattggttcttcagctattattatatctgtgtcaatattcgcatggatgacatggccatccgtgctacgccgcacagttccttttatgcccatcaagcaatgctcctgcacatggaaagggtagatacttcgcatgagaaccagagaaaaacagaagaagaaaaagacatgtaggcatggcagaaaatgatacatcacatactaatcaagtacaacactacctttgagtgctgcaacaatgtatgtgagtcatgccgcagacttggagctgcatttttcttgttcgttttcacccagcaaacatcttcacacctacggaatccccactgatcatagaaaaatttcagtcagcctcatctacttgttattgcagctcatcaacaactgaaaattaaaacacacatacatgaaataaaactgtggaagtatgaaacaatgtttatgttgctacgacattccatcagagggcaaaaattgatttgaagctgcgggaacctgggtgacctcctaaaaaatgatttcaagatcccaccccatcccccaaaacgaatggcattacaataataatatagagcgcagtcatttaagtacggaaatagcaggctctaccttctttaaacactgacgaccctgttcaaggcctacaccatcaccaacccaaaggaacacaaaggagggtgtatctgcaatagcctgttgattcaaaaaatacacttctaaatattaattctgcagcataaatgaaatcacaaaatagaaaggataaagaaaaggggaaaacctcaatcttcaaattcataatctcctcagcagtccaatattctatgtgatctgtgattcctggcgcacggtgagtatactcctcccatggaggatccacaagaataacatcgaacttggtaccaaaaaactctggagaaagaacatgttcccgcaggtcacacttgtaatacattggcggtgaagctgacttagcaacaatttcatctttcctctgtatgagttctctcaactttggatagtcctctgctacgcttgtaagatccagttctctaatgaaattttgaggcctcatgccagtgtccacaaagttctgtgagtaatcattttgttcgccccttgaaggagcttttctgtttggtccactgttcctatgtggcatccaaccaggtttatcatggagcatttcacggctttgaggacccatattattgtaacccaaacctgatatatctgctggaccacctaacccagtgtccatttgatttaagtggatattatgactagacccagctcccacatttggtgcaaacctatgttctggagcaactggaggaatggtaaggttgggaggaacagaaagcatattcacatcaacacctcgagctccaggccacactagaggccctggaaatggcggcatgaaaacgccaggtaggagaggaggaccaggagaatggggaatatttggccccatatgctgcattggtcctggtggaagtccaagaggaccaaatggaggaggcatgattggcattggaactccaattctttgagaatcccttccatttggtctaccccttcctcctctagatgacctatcgccttttggaccttgttgaggaaacgaagaaaccatgcttgtgctaccacttggatctggttcaagatgatcagaggatttatcatcagttcctccaggtactgaatctcggtgtgctccggtttcaaatcttctaccagaaacagagccctctcttccaaagttaagattactattaggtcgaatctctattgagtctgaattgtcgtatcggttcccatagtttgagggacctctaatactttcagatctacccctagaatctctccgatatccagttcggccatggaaattcccgccatctagcctttcctgtgcattcctccattcaaaatcatttggctccttagtatctcgtaattgagtgttcctcccatagtccttagaaccttcaatgtctcgggttttctcattccaattcctatccctccctctgtcagatttatcatctctataagcttctcttgtgtcaactctaagagaaccaccagtttcatcaacataaacttcatctaccctcctgactgatgccctttcatcttgatcccgttgtccttgcttctccctactaccctctcttctctctgaactcctagcagaagcatcagggctaaatcttcttgaaggttcccaatcattattgtcccctcttcccctccttctatcatagtctcgatccttggaatcatcagggcttctcctttgaactttaggagatcgtgagtcccttctcaga

SEQ ID NO: 301 - DNA, 1602 bp, Zea mays
ctccttgattcattcctatcatttgaaggtgtaatcattctattatcatcctgatgcccagtttcatgttcatatccatgttttctggatatatccgaataatttctgctatccacattctcctgattttcttgctcctccttccaagtattccttgcattaacattatcatcaacctcctgcttactgcgacctctactagactcaggtccgtccatggcactctctattatatagagtcaaactgctacttttcccaacaaatacaactgtcgataaacctcggcaaagaagttgagattcctatacacaaaatactgataaacaatatcaataccgtgggtatacaaaagcgaaaggaaaacagtatacgacaggagaacttgtcataatggaactgcaaacaaggtcaactgaaaggacgtcagaaatctaaatttgctgcacatttagattaataggtagaaataagcatgcttacaacaaacctactcaaggttagaaaaggcgctaggtggtgacccatttaacgacccagctctcccagagtaaccagccgtgaaagataaaaaataaactttttaactcattttgcctgggtttttttaccctcacgagactattgaaatgccactgctgctctgatccacaatcaatgaacaaggatggccgacgtttagtcctaatgacaatgcaacaggatcccacttggatggaacagcctttttttttacttcatctcaaagaactaatggagaagcctttaggtgcaagtagtacaaagaaatgaaatatcagtcgaagctagatgcttggtctctttggcatcagtcaaccaagctccacttaattatagagagcattaaaatagcctgaaggaactttccctttcccttggactgaagatttcagattaagcaattctgacatataatcaagaaaattaaaatgtgatcgtgatcagaataaattgtaaacatattgcaaatagagttccacagctgtacttaacaacataatgaacttcagagtcaaacttcttttagtcaccaattaaccttgtttgtcatattactagaaagtagagttccagtgaagaaataaagaaaaggtggcttttaaccctgataaacagggaataaccacctccaaatgttaaaggagcagatttccagtgttacaacccaaaatattaaactatttttagaaaggaaatcaggaaaagaaacaccgagcgtaagggcacatcgaacagtatgaaacacagccatactcgagttgaactttatcagaaacagtgcaatatcagatgttgaagtgttaaacagagagatgctaacctagtcatggtcttgatgacacaagcctaatatgtgaattgtacttaaaaccaagccggcaagtaaagctgcttttcaccttcgtgggcgcagctggccggcacggggtgcggctggccggagcggcggcgcggctggcgtgaggctggtgcgtgcctgcaccctgcggctgcggctgcggctgcggttactcggttagggtttggaactggcggccgagatggctactgcctgctgctgcaccggcttccagcccaggaac

SEQ ID NO: 302 - DNA, 738 bp, Zea mays
gccgccgcgaacggacctagggtttggggcgcaggaacgggagtcggaggggagattgggagaagcgccttcacgtcgagcgtacagcagttgcgcattggagaagttgggccactctgtattgttgggccgacggagatgcatgggagagcaggaggccacctattgttttgggcgggcccgctcttgcgcagaactcgactccagtccagattgttcgtgcgaactgcgaagcacgtcgtccggtcgtcggctcaaaccagagccagcccagacccgtcctcgctcggttcaactttgcgccgtcgtcgtgcgatcggacggctgttgtggacgtgtggcctcaaagtagggtgcgccgtgctcatcgtcttgtccgacagaagagtcgctccaactgtccaaccacagctccgcgccgccgccgaggacgacaaaggcgtcccgctgttcttgttgggcgcctcttcggaggtaacgtcggtttcctctataataaatccgcagcggtttaaatagtacccgtgcttctccaacggctgaatcagctcgctcctcactggagtaagtgtttgattgattccacatgctctaaattgaatctgagtgtgtgccgcggcctgcgggaggaattcctcaccacacgcagttcttacaagcctcactcattggcctgcagtgttattcagtttttttttcacttttttccacacgatgacattgttccatttccattca

SEQ ID NO: 303 - DNA, 1226 bp, Zea mays
caatcgacagtgatatattattgctgattcgtggcctgagtcctcaccgttgattttttagaaccttacgtcatttttatatttctaaattaaaaaccaccattgatgggtcaacaatttatagtgaagtgggtagcaatcatgtgcttacactattacatgcattgcaccatctgaacactatgtggataaatttatacctcatagctactcaaaattgattgttctatctaacacaacaatttttatatactttatatgatttcgtcatacattcagtgatttttaatatgtactttgctaaaaccttatccggagttatatcaacccttgctacatctttttgagacattacaaatctatatttagtgaatctcaatttctaattctaagtgaatgtcatatttttcatccacacattaaatttagactttgcttcttattatatattctattaaaaatgtcaactatattttgttaaaatagattctagaccgtaccatacattatattctttgatattacagtgacatgacaatagtttcaatctacaccgcaacacttaaaatgttgaattatcttctatccaagaatcatatgtataacggcactgttttataaaaaatggagttctcacagttgggttccaattttggtatgccaaggtgtatacaaagtaataacttacagaaaatattatggtagagtttggtttgttaatgaaacaatttctcaccaccaataaactctaaatgtatatattaaccgttaatatatataatgtatacttgtactttatggcacctggcatttatgtttattttcaattgaatattggtagaactcggtagttttgaaatatatatactgtatttttttcattgtttatttttaagacaaactgtagctatcaatttaaggacctatttttttgaaaaaaactaaattactggatctaaaattttaggtgatctgataacccacacccaaatattttctccatccaggaaagaatggaagtctcgtttcccaaggagtcaaaacattctaaatcttcataggattgcataagataatatcttccactatgtttgtcataaaaaacatttgacgactaatgtattattttttctgaagatcatatatattaatagtttctgtatatatttaatcaaattggagattgtttttggggaaatatggatctgttactagtttactactaa

SEQ ID NO: 304 - DNA, 763 bp, Zea mays
tgtttttgagattttcctccttttgggagacgacaatccgcagaatacaaaacacacgtgcagacaatgggccgaaacgtgccatgagtgctcgggctttaaggaagagtctccatgctattgagctgctaatcctcgctctgtttcgggccgtatgccccagtccggactccggagttcccacaccagcccgcgggctcgatatttgctttcgcaatttcctctcgtcgctcgccgctaggctctagcgcctggtcactcgcagtcgcagcggagattttggccccgtgtgccgtgttcgtgttgcagcctggttccgatcaaccgcttcctggctatctcggcgtccttcgagcgccgctgcgggtgctggctcggcgggtgcggcgacatctgctcctgcgccgagggtgttcgacggaatgacgcataatgagagaggtagccagcggttcttctctgactgtacttttttccccattatcgaaattgatgatttgatgtgctatagtagtgtcagtgctacgtagggctggactggactgaaaatatgccctgctgctgcatgtagagtacagttttgtgtgctccgtgtctctgccattccccttttgcaatcttattgcctctgaatttctgcatcatatgaccagagtccctgtggtttattttcgttatgggagttgggtccgtttttttttctttttgtagaagcctggttgaggtaaactctaagtaaggccccgtttggtttggagtaact

SEQ ID NO: 305 - DNA, 2237 bp, Zea mays
taacttgtgttttgtggaacgctgtttaacgccatcctgattcagggtgagctcatctggaaaataagaatattactgttagcaaagcactgaattgtttaatccttcggtactgttgttctgtcattccaaatggtcgtgccctagcccctctgattttatggttatctaacaattctattcagtaaacaaattctgcaagactgaaaatggacatgaaaaatgaggctattatgactggagtactagtgttcagtgtcacaatataagtgctatgctaaattcagctcgcaaaggtgttaaacctgcagctccattagtttagctcctgatttattttttcaaatgttttttttcattttcaaccatttgtacagattttagtgaaatccggtgtattttctcattttgatttattttaaacttgcattccttttatgacgggatgtaaatttgatagcagaagatatgtgaatgagtatcacaaggttgctacttgtattaacttgctatttctttcagcgatgcaatgcaaaagtttctgattttctgaaggtggacaaacatgctgaaacattcacagttcagtctgcagagaattttttctgctcttagcgtcaagcaaattccacttcctttttgtaagtacaaatcccactttgtgaagtttgcctaaaagtaaaactgagagagtttggggcagctgccttgcttggatgggcatttggtttaaccatcaatctataaaacagtgtgcctgttctcttattgctgtactctccggaattcattttggtgctcgttctttttgtaacaagctaaacaatggaattgccctaaaggatagaagccttattaggtttgacaggaatttgattgacatgtttacgctacatgaacttttgcaacagtgtacacagaagaggtccctcttggttgggaaaggctgccatggtttagccatccatttgggtttggtaactgatactgtcacatgcaatattctcatcaacttgtatacaaaatgtggtaggaatgattgcgctcgccatgtttttgactcaatgtctttcagaagcatagtctcatggaataccatgattgctgggtatacctgcaatggagatggtttacaggctctgaagcttttttcaaagatgcaccaagaagggacacagatgagtgaatttaccctgtccagcaccctatgtgcatgtgctgcagaatgtgctactatagaatgcagacaattacatgctatagcaatgaagcttgcattggactcaaatagttttgttggaactgctgttcttgatgtttatgcgaagtgtaatatgattaatgatgcctgtttggtttttgagaagattcctgagaaaactgcagttacatggagtacattgtttgtaggactcatgcaaaatggtcttcacgaagatgcattacgtctattccagggttcacaaagggaagggatacaattgactgaattcactctttctgctatactcagtacatgtgcaagcctagcattgatgattgaaggaatgcagctgcatgcagatgttatcaagtatggttttaataacaatttgtttgtggcatcatctcttgtggatgtttatgcaaggtgtgggcagattgagaaagcctatctagtatttgctgacatgaaacacaagaatgttgtcctgtggaatgcaatgataactagttttactaggcatggtaaatctttggaagcaatgattctctttgagaaaatgcagcagtcagggatatctccaaatgaagttacttatgtctccatgatgtcggtgtgtggtcatgcaggtttagttgaagaggcccgatgctactttgatctgctggttactgatcagactgttaaacctaatattgttcactattcttgcatggttgatgttttggggcgatctgggaagactgatgaggcttgggaactgattcaacaaatgccatttgaaccaactccttctatgtggggatctttgcttggttcatgccgtaagtacaggaatgtcggaatagccagactagcagctgaacagcttttcaaacttgaaccagaaaatggtgggaaccatgctttgctttcggatgtatatgctgccagcggaagctgggagaatgctgtgttggcaaggaagtatttgaatgatactggtgcaaggaaagatacagcctcaagttggatgtaggcaaagccgcaaagg

SEQ ID NO: 306 - DNA, 2176 bp, Zea mays
ctatcatagtagtaacagcagttagtttatttagttagaatctcatggaggccacattactcattatgtaaattgtggtgcttctgcttggcaatttgcagaaataatgataaagcttgaccacaccaattgtgccactttacagactaatgaaagtatataaaggaaatgaaatgatcagttgtcactacctgccacaccagtggcatgtattttgcctttactatcattctcctcttcccaactaaattgtgctgtagaccaaacagagcatatttaatgatgccttttcctaatctaaacctttctcttagctggttcctattgattaaattctgatgagaaagctggtccttttgttgttttttactttactgattattttagtcacctatgtatttccatttttcttgactaggctatagcatcacctataaatctaaacaatttttttctcaaatttggatttatggccttgccatttcactgctttctgcatcatttaaaagctcaatgcacagctcataaaccagcatcttttgttgatggttgatcaggcacctacttgtttgtggattggcctgcagggtccataagcataagcataattttctttttggtttgataaggtaaagctttctgctacctgtttgtttataagttttatattcattatcctgtacgtcagtatgtgccagacctgcaggatccaaaagttaagaacaacatgcaaattgaaccaaacaaataattgcaacatatcatggaaacagtaacttgttactccagtagattgtcacagcaagctaaaatatgaaggctcactaatcttatctgcggtcttggatcttgatatggtaacgcaccatcacagccctagttgcctatgggcaagcaaagtcgcagaccaccagtaggggggaaataatgcatgaagaaacaatgatgtcttcatgagttctgcagttatctgcacaatttgcattctctaacccatgttagatgccaaatctttagtgaatacagacccacgtgcaattgtaagttagtcatggaagcattgttatctgattttcggagtacggtgaagggcccactctgctgtggacgtggaacgagttgaagtggttgctgttgaggattaaaagatggaaccatcctaaagcaatattgttcagctttatgagtgcatgccattagtaccatatatattgctaatgcatgtctagtattattaataccatgacacgcgtcatttttgctagacagaaaaggattccagcccccatagctttagtggagtgttcatttacctggttcgttggctgttagctggcaacgggggcgattaggctgaaacgacacatttgatctgagaggaacaggtctgcgtttcggaagtagtagtaagaccctggactggcgggtggttaaaatgtgaacatcagtgagtagcagctgatcgtgattggacggtcaaatttggcagtattaggatgcactagctagcactaggggtgagcagtggatacattataaaataatcgaattaagctagagttacctgcacgcatacaccaaactaatagcataggaccggtcaagattcgagatggtggacagtaagtagattagaacccccaattggcctgcacgtgtatgcatgattggccggcagacgtacgtatctggtaggtggggggaggcggtggcatactcaagcgggaaacttatacacatcatctactcccgccgttccaatgtacaggttgttttgggtttttttaggcacacaacctgtattatatatctaggtatatagtagtttaggacagaggatgttggttaaccgctgaatattgcttgcttttccgactagttaatgttttagtttaattaagcttgattggcagacaagcgattgtgataatctccttgcttgtattgtatgcatgcagggctccactgtgcctagtgaggcacgtcttgcggaaaacaagtgtatgttggtcattgccgaaatccaggaatcagttctccagctactcccttctctgccgttggattacgtcgtcacagggacggctgagcatggtgcaggggacatgtgaggcccccctcgccactggcgttgccggaggtacgcacggcacgacgcagtgaccagtgaggtgag

SEQ ID NO: 307 - DNA, 997 bp, Zea mays
acggagaaaattgtccgcgctgtcgcgttaaagtcatatatgtaaacttgaaactgaaagtaatacaagggcacaaagcatattaatatgactaatttacttattcttattgataaaaaggttgacacaattgaatattgtagtgattatactaagaaattgttgcccaaattagaagctgaaactgtagagtaccctttttgtcttcttcagtagtagatatgatgaatctcataaatctcaaaatcttcatgctcaagtctatgatgaatggacaattatgaaagctactaaaccacgtcaaataatatggtccaaccttctaatctaaggaaactatacgagaagcaaatcagacaatctatggtttatgttattatctttttcattgtttctcatttttgtttttatatgatttttcttgctgatatctctgttgttacaactttataaaatatggagaaggtaccctttctgaaagtagtggtggagcaacgagaaatcaagatggtttgagtcaaacactcaaacattccccaaattgcactcattatattactcgcatgcctaactacacttcttatgtttctctcaaaacaatagtgaatcccttcgcagagccaagcagctataaggacataagtgaaatatttctatttcatcatttttaatgttttctatttttgacagttgtaagcacattgtttaaatctttgacagacattcacaatcattatactaagattgtgaatatgattgtcaaatatctgtctggaagtgcaacattcttccccagatttgttgcgttcaagtaattctgttgtctcactttatcgttacctactgtcaaaatattattcttaacatttttgcatttgataacaacttcacaccctaactattaaattgttgtcattgatagattctttgttggctttgagctctcttgattgttttatctcatcattttctatcttaaaaaaagggtctatgcaag

SEQ ID NO: 308 - DNA, 552 bp, Zea mays
ttgattatcgaattatccacctttctaatgcatattttaagagtgtttatagtgcctaccaaacagggtggctcaccgaattaaacttctcatgtcaagttaagtaacttggctagtttggtagggtccatctatagttaaactgatcatctctagttaagggtccatctatagtgcctgtttggtagggtgaaattatctcaagttccacagcaaaattcaaacaaaaattaccactgttttatcccctaacaaaccctagttctggaaatctatatgaataactaaaaatataaccagaacaaacgcaaagccactaaccattcataaagcccagctaaacaacaataggcgcacaatgttgcaagcccaaaaaatctaccaagcaatcagagttaaacatagaccacaatttcaaaacaagcaaacgcaaatctagtatccacaaaaatgttcagctccgatgcaaggaactacagaatctccaacctaataatagccgccctagaaaaagtgcacatccgaatctaatccttgagtttatatatgaaa

SEQ ID NO: 309 - DNA, 609 bp, Zea mays
accaaacactctgcacccacacgagaccaagttacactcgcgactattgtccatgtgctgttgtgttctgctcacgctagcaatcccccttccaaatccgggtttgtagatctagttctatttggtaataaaattacatcttgtgtagcttttcttttgcgctcttatcgtcgcacgttgttgctccactctgcgctctaatatcgaccgctaatatggtatgtctttgacttctttgtctagtggtgctccagttctacgatattcgatgtttttaatagcaccaattacccatgcatgtgtctgcacatgtggttcgcgcctttgagagttcctcaccggcaatccagcgtgtcatgcttatcctatcgctcctacatcgcctgtaatcccaaagaaggctactggcgaggagttaattgcacactatgatgatcagatgtcctcttatgactcagtttagtccttacaggacttggttagattagggtgcccatgtcagtgttgttcttgcctcaaatatggaggatcgtcttaatgctaatattgttgagtttgagtttgcacatcacatgtgcgctttttgtgtggtcgttacgagcctattga

SEQ ID NO: 310 - DNA, 1166 bp, Zea mays
tacacgctctagtcttcccagccacaatatacagttgcaaccgaactacatcaaatgacatggtctcaagagaagctgagttgcatttcgagccattcttgtttgaaatcaaataacaatcagtggtaaagtggtaattacaaatctaaaacgttaaaccccggtaagaaacaacaggggtcatcattgccaaccatcaaatcttgctgacatctcaaggcccatgcttattgtcttacttatcattagacattgcgtcatcaggggctgcacaaacaaaactgtcacggatgtgtaataaaaactttggaagaggcaaaaagatactttggtatataattgaccactcctccatgcactacatgaatcagtgagcaataaaaggattttacagtgcaatggctaccttgtttgctcccattacaacagcatgcaaagaattcctctaacggacgtttaggaacaggaataagcttcccccacgaatgctagcggccagcttcaaagcaataagagagtgatcaggcgcaatagagggaaagaaacatgtcatgattctaccaagagctactctatttcatcagcattcagcaagcatatggaaatctgacctgaaaaaagcaagacctgtcgataccaaccacaactgccaacttagccttagcccttactgttgaggcaaacttgccaaggaaatcaacgataagagcctaaacatatacagaaacaaaagaacatgagaacaaaaactggtatggctatgatgccaataaacagatggttccctaaaatgcccttgaatatattcagctcatctagttcacgcaaatcgaatttgttgaacacctaagacaaaaatacacgtcaggccattactgtatttgttgtataaagctctagagtcacattagacaaaaaaaggcacaaacttcttttctaagcaaaagctaaagcataggacctggcagagaacaaatgtgttgaatatgaaggtattttcactttatctggatgtgttggatcatcatttttcagctgtaggaggcttattcccttgaagttgagagtgagaactgaaacttgaaacaaagcctgaacaaagaacaagtgtttagtaggaagatctataatatgaaatatagaataaagcagcagcatatatatca

SEQ ID NO: 311 - DNA, 542 bp, Zea mays
tgctaacacatatatttttgacacttcaataacagtatacagaggtaagcactaacataaatttgatgcgggaatggtctagcaactaaaattaccaagaatcttatatttacaatctaatgcaaaatacttcatctgatcacaaaaatgtaggtccatttaagtttgtcgtaattcaatatcaccaataattaaaatttcaaatagattggcaacataagactgatgctagcagattcgttataaaaaatattttcgttttctatttggaatttataagtattgctgattattgtattagagaccatgcatgtcaatgtccaattgatttgtgtaagagaaagtagtgtgcccgtgcgtcattactttcttcccttatcacatgcttgaaattattgagttcagcaaagtcatcaccgtacaccatcttgatgttatccacacaagcactaagaatacatgcagatatgtaaaccaggaaagatagcagacctggcaagcttcccggtctgtgtggcacgcaaagaagtcatcaaatacct

SEQ ID NO: 312 - DNA, 779 bp, Zea mays
ggctagaacacgcctgaaatttgcgtcgcacaaagtttatcgacatcattattgagccgttaataagcagcattatccaccacctctacacgcccaatgccatcagtgagtacctatacaagcaaaaggggggaggtgctgaaccgtagccccagttttagccactcgccgcagacgcaagagagagacgaagccttagaacttcaagcaccaaagaaacctgagaaatcacaaaatacacaatcatgtttcaacaggtctacagaccccggccccacgaaccatataggattggatcacttgacagggaattatcacaaaatacacaagcatgtttcaacaggtgtacaccctaaacaatatcacaataattacacattcatataacaagaaacaatagtaacaagaaaaaacctgccaatccaaaagtatgcacacaacaggtatatatgttgtgcgaaagccagggagcagaagtggcgggggacaacagtgtatttagaaggaggtggagtggggactgtgaactgctcctgaatgctgtaattgctcctgaaggagttagttatgacgtacgaccgttgaaagacgcacacgcgtatgtataggccatcagtatggttgttctcaatatatgccacagcgtcggtgctcgcccgtgtctcggctgcgttcaatgccccagaaactttggggtccatatcgatggtaaatccctctttcctcatggattcataagacgggtcggcggcttagtgtctcacattcagtcgcgacgg

SEQ ID NO: 313 - DNA, 620 bp, Zea mays
cagctctccaggaagagctacagaaaccactcactgaaaaggtcaggttgttcttctcgttcgtaactactagaaccagacaattcttaatactggaaagtattgttctcgatcgtcgcctgttcatgaagcatatgtgtcactgaatgccagcattttgtctctgcaggagattgatgagctatgtgatgagtgggagccagagccgctattatatgccctccagtaaaggagggggctcgaagtgatactacattggtattggaaatttagcagcctaaggaagtaaattcacaattaaatagggtacgctgtggttgttgttgcatgagtaaccctactacatatcatttcatatctatatatggattaactaataagtgatctcactcttgaagttgtgggagcgttggtccagttctagcttatactagtttcacttaacttaatagtgccatgtgtgggacctattatattgttttggaacgtttacttgctagattatatgacatttaaaccatgtatttatgaataagcagcaagggacacattgaaccacaaagaatttcattttcccttgctacccaaatgtctacatagctacatgtgagagaggattg

SEQ ID NO: 314 - DNA, 2529 bp, Zea mays
tcccccataccaatatctgtattacatctaatatctttggattgacaatgcgtcttttgatcttcagaataagcatccttatttgaaaaaccaccaatgttcttctcacccacactgctattcacactggcagatgatgggctcgcaactgatgtaccagaaagcgagacccactttgaccaatcataacgccttctaatcttgtcatcctgtcagtagaccagcagaggataaggtaaaaccaaatacctaaacagaacatggaatttgaacaatgactattgaaataacattgcaacctgaacttctagaagacttgagcttgtcagtgcatccaatatcaggtgtatatctgcggtcattttcttaagctgcaaataaaaaaatgagttgtttcctagcacaagggcaaaataatagaaatttaatattaagcaatctggaaagaaaacatactctattgaaatctgcaagttttgaaactggaacccaaccatgctcatccattaaagatttcaggaaatcatcacgctccagatttgcatcactgaaaaacatgattgcatgaacaaaggattgcatgccacacttgctaaaagaacatttaatcgctcctgatgttatcgaaacatatgagattttatcagattgtaggctgtattggtatttgtgtgcatgttgcaccatgacattacaaccttgaagtgtgatacaacatcaaactgaactttttaacatcatgtttctgacaatagacaaaaatccaattaaaataaactatttggcaccactacccagcacccaataaaaataaatgagaatctatcaacatattgttacaaatccacgcatctatgtttataggtatcatcacgctttgttatgactccaaaggaagataataagaatttacctgaagtagtactccacttgagttagtatattagatcttaactcagcagcttctggggataaaacaggattaggagctggttgattttgaatgtagtgtgatggacttctcatcgaatccataggcacagtgggcatgtaataatacatgggagggataggccctgagtttaaagcatttatcaatatttgaaaactaaaaagaaatctgaactgcaaacatgtcataaatggtgagcatagcattaccaggatatggtggtccattgatgtatccaagaggcaccattggtcttacaaaagctcttggcccaagaccttgtggtagatttgtgttttctctagtaccaaacatctgaggattttgccaagcctgtccataatggccatggccttcaggagaaggatggggcctagtgccatgagtgccaacaggaggccgccaaagatgaggacctcctcttggatgtggaggcgttggcctgttactttcatgggcaccaacttgatctactggaacaaaaggaggcacggaattctcaaaaccagactttccaacatgccggtcatgattcgggactgggataggaaatggctggtaagaatattcttgtagtatcattggactgggaaccacggggtaaaaaatgggttgccctggatgttggggataatgcattggtggagggtaaggtggtgcaccattagcagcaggaaaacgtcgcctgggcccatttctatgatgggcttggtgatttctgttgggatttccatttccatggccatcaaacttgtgcatacgactagccacctgacaatgtttgcccatttttatcaaactgaagcaaataatgtagtaaatggaaaatgcacataggatctaacctaggaagagtgactctaatcgtatatgcatcagttgatcagtaacggaatgctataatgtctttccaaaaaaccaaagaagcaccacattttttattgagatacaaaagatgcaatgaagcaaaacaaaaccaaaatagattgaaatgtttacatagtagagaaagggggatgggaatggcaagacctgccacaatgcctatcagacttcagaatggtgttgtgtcaaaagtgttatacagaatacagggtaaaagtccagcacattcagagcgagatttggactggccatcctcgaaatgaagcatgccacgcaaaagaatactacctaactgcaaagatgatgcttcagcagttcagctaggcgacaaatttgagttaccatcatgacaagtgtaacatgcttcaaacgtagcgcaacctggtcagctggaacccaacatctaccatgaaagcactggacaaaaagctggagctactataaaatagctatctgttactactcgccaacgaatcgacacacacctacattcaaccaggcagcacaaaaaaagtactgtaataactacccatatccacggaagtgatcaacagctagcatttgcatcaaaagtaccttacaaatgagctacacgaaaatagacacagtcacacagacccagtgaacaataaaacttacatatgtgagcagattagaaccaggcacagatcatacctgcgatggagccgacg

SEQ ID NO: 315 - DNA, 2131 bp, Zea mays
tggtcttgagagtatcgctcgatggatttagagagggttatggatgtaggagtgatttggtcatatggattttataagaatttgagagtgttgtttgatggatttaggaaatgttatgggtgtaggagtgatttgacaggatgggttttattataaagttaaagctggtgggttatacaaggagtatagtcgtatagacttggtgagactctgtctcctgcttgcttttctgtttgagttctgatgggcctcggcctcttttaatattcagagacctggtttgaagcaagatactactgattttgcctggtgggccggacgggcggtggacggtctccatttgccaagctgcttgtacagttgtactcgcagaacttgcttcatgaccatgagcacaagctagcaacatgcaacattgcagttgcagatatatagtacatatttttttttggaaagggcggttgcaggttgtagctactgagataaaggatttttttataatgaccgctattagcaaaaacagttgaccgaacgaagtggtcgacgtccccttccggtcgacaacatttctgaagcatgcatgaatctgcttgttaaattattgggtgcgaccaagtagctcgtgtgtacatgcgcgtttacgggtatatgtaaggtgcatgcgtttctttgtccttttgacacagtccttagttctgcgccgaaacttttacgctatcatcactgtcatggtctctataagaagtcataaaaatagataaagctactatacaatcaagttttccgtatagtatagtcacgccgtatataattaaactatcagaaattataaaaaagaactcaaaaaacccatagatatgcagtattattcactctatttttctttaatatatgttttgatttacgatgaattagaatctaaaaaagacatggttattttacgaagcatgattggatccggacccccatgcattcacattcacttacgcgccgatgtggcatcatccgatcatcggtggcggcggcgatcaggtctggagctcggagtcggacgcggtcctggtcgtcccaactccaactccatgcagcgcttacgtgaaaggcgaagccgacaagaaagagacgagagctcgaatcaccgggctccacctccatgacacgtgagcagctgaaccggtccggtcccgcccggtcccggccccagcagcttcgccacccacccaccacgacaccacacctcagtcctcctcacacaaaaacgccaaacattttaaagcccccgcctccttccccgcggaaccaattcatcccccctcttctgtccagtccattcccccattctcttctcttcacgattccgcgggcgcggaagcccgaagcggcggagagatgtgggtgttctacatgatatcgctgccgctgacggtggggatggtggcggcgacgctgcgctacttcgcgggccccgccgtgccggcccacgtcctcgccgtcgtcggctacgcatggctctcctccctctccttcgttgtcctcgtccctactgacatctggacggtgcgcctccctcccgccgtgctgctagagtgcagagtgtgctaatgctgtgcctgtgcgtcgccgcgacctctccgccgctccgcttagtgcgcgcgctatcactattcactaattaacagagatcatttgcgcgtacagccgggttaccagtaaactgtgctggttgcgttgcgcggtcgtgcgactgcgggagatgggagccgttttggttaggacactggtaatgtagcgtcagaatcggagtttggatgaaccatatccatttctgaacctgttgctagtttactaagaaatgatttaaactggattaacttatgaataatggtggttcgatagcgtacccagtagtctggtaggtaatagtctcgatgccaaggtactgaaggtaggaattcgtggaaactgtcacaatcaagaaagtgattggggttagatggcgatctgaaatcgtcaaattggcattgggctggttctatgactcgtcaacggagtttgttgttgaaatttaagcacaccatcaacatcgataaagcaagtaggtttgtgacttgaagtcgcggccgcactgacc

SEQ ID NO: 316 - DNA, 2081 bp, Zea mays
tcgtggcacaaatcatggctagtctgaacgggtcgaccattagcatgctttgtcaaaaaaaagaacgaacaaaacaaattaaaaccggatagacaaattagccttcatatgtatcagtacacttatgacaacccattaccacaaaaaatagtgatttcgttaaaactatcattaaggaagtgccataatcattcatggacatagaaaaatacacatatcaagtatcattcaaagcataaggtaaactgatcatattttcaagcatccagtactccacgaagaaagccatccacgtagaaggaacaatacttggcaaaacaaccataaagagggggaataggtgaatatgcataccttcgacaacctagacagcccatacttaaccttcgcaatgattataatatgtgtaggagcttgtggtgatatgtctctacatgcaagaacctgcagttatagacatacaaatgtgacatcacaacaatttaactgtaatcacatactacactaatatttcaatccgattctcgatatccatgaagatacgtttcagaaggtgtttggcttgccaaggaaatcaaggtgttatttcaggagcacaatttttttatgatagaccaattaatatccttcttaagcattaaagatttgaatgtgagatcctctgctgacatggcagcaagggtgatagagacaacttacaaagattttggagcccagaatttcaaggaggaatatgcagggataactggttcttgagttttaccaatggcatatcaaggaggaacatcaacatagcaccaaggtgacaaaggcattgaggcaacattaattttaaagtgtaacatactaacattcatagcattataaacaataggaactctaccctgatggcatagataatactaaccttctcatcctcataaaccacctcagatgggatctccttccgaataattttgtcaaaactacataaggcagagaagtaatcatgtgaatagaggcgtttgcgagctgtatgtgtgaagaggataaattgtaaccatatacaaaaattatcagaacagccaacaccaaagcttttcaagtaaaaaagaatggagctcgaatttagcacaggttagctagtatttcacatatataagtaacaataatgatgcccaagcttgattaactaacagaaactgctatgcagagaagttatctgaagatttctgcaagtttccctagccataggttgggtgcatcgtgacggataaacaaatgctgccaagccaatgatatattttcaggagctcgataaccaattccatcagatgccataacgtgtgggattgttaagccagatgatgtgagctaaccaaaaactgctccactattgagcttgtcttatgacaaatgagctcctgttgaggagaggagattgtgctcctgctcctgcatgtggtgaaccgggggtttcaattgcatacctcaaacttaaaacaagcaaggcccttaggtaatgttgccatctgaatgaccactatggacatactgcgttgagattatcttgattcgcccaatcgagtgacaatcgaagcacataggcgtctcctataaaacctaccaaactcaacagaataggaccctgactacatgaaccgtctctcacagtgggaatgtgggattcagtactgaagtccaaccaacacctaggactaggatacaaaatccagggtactctctgcttttgcttatttcactagaacgaattactcgccaaaatagatatacgctcactacggcagcttccctaccgaatcgaaacgacggtgcaggatttggagagaactgatagaggctgacatggtgggggtgctgttgaggtcggtggcgagggcggcttccttctccccggatatggctgccggactgccgagcggagggagggataagtgggaagcgatgaccgcgaggcggttgccgctcgccgtcggcgggctattgcgcctcatccccactgatttccgtcgcaccttcgctgctcgcctgcccgtcttccgaaggtgaagaagacgtgaagttgtagagcagttgaccag

SEQ ID NO: 317 - DNA, 4938 bp, Zea mays
cgatctggtcgaacacgaacttgttggcagcctcggtgaagtgcacgccgtcccagctcaccctcttggaggggttttcgcacgacttccccaccaccaccgacgtcccgttcacctgcttcttcccgccgcagccgacgctcaggtctaagttgtaccggccgccgccgtacccgcagcatgtcagcagagggtcgtcgaagcctgcaccacaaacaatacaaacatgagctccttccgcgcgaggaaacgttcagagccagccagcattagaatttagaaacaacaccaacatgaacgccttaccgagcttattggcctggctgatgagcttgtacttggcggtgtagacgtcgacgtaggtgaacgcggcgtcagggtgcgtcttccggaggctcgccacagtctccttgagcctgaggttgaatagctgcgcgaccttgttgtaggtgacggagcagccggtgccgtccgctgggatggcgaggtcagggcggtgcagcagcgcgtagggcaggcagccgagcggccctgtgttgtgtatccagaagtaccttcctccacgcgagtacacgctctgcaaatttgcatgtattcagctaaatgagcagaccatccatggaacgttgtgtgtggtaacatcttccaaagagcaacagcaacttgatgcttgctctgccaaagagcacctggattatagatgtgagcctctccatcagatcagggattatggcttcgacttcttcggtggtattgttaacaaagtagcttgaggtgatgtcgttttgaccgatgtcgaaggtgtaaagtgcctgggagaagtactccgcccttggtaggatctccctgtagataccgcctacatgtagaagagtaagtgttactgaataaaatcttgacgggataaaacataaaaatactgatggagatggtttggggggtttctgttgtcacctttgttgttgtagacgagttggcttctgttgatgaattgttcaaactcccagaactgcacgtccaaggaaatggggctgaaaccagagaggaacagcgatgtattctgtcttctgatcgatgaaccagctgttgcaaagttggctccctgtgtgaagttgcttccgatcgagttcaggtacgcactgaggtgagtcagccccaggctttcagctgcagttcgggaaacgaagagataaagagtaaatcaagaagcaccatttgatcatttgtcgctgaagagttactgtcttggcgctagtctatggcaaaacaactcgacacttaatgatcagtacattccagttggcgaagtctaggcctctagggacagaagcttctgttaccagttgacattcattgcgaaatctaaactgcgaggtgcatgaatttggccaaacacagtgaagccttccgaaaattcagtagaaatatagaacgaggtagttccatacaagttgaagccttgtgcattcagtttcttactgaattcatgcatttcgaacaggacctgcatgtgttttgtagcacttcccactgtctgctgttcagattctagtgttatatatacccttaaagttaccaaaggacagattaagaaaaaaatgtcagtgtcaccctttatccttcaactctggtgacaatctataaagtgaaacatccgtatttgataaaaaatattcctccactgccacccaaatctgattccctcctcatgccgctttgcccccactatattttcatgtacctactaccacaataggctaatgcttcttcctgtccttcccaatatcagcatccccaaaaggttaaagaggagttcgtctaaaataaaaagggctaaaggaagatcaacagggcatctccattgctcgtactgtatctcccaacagcatggcagtggcctatgatcgtatgcaaagatactttgcccgaatcactgaactttttgtcagattgcttggaatgaaaccaagatcgtgccagaaaggcaggtcaaaataatcacacgacacgcgtgctcacgtgctggattgagacggggacgcgcatcatggttgccctggggacatgcccgcacgcgcatgggccggtcgaggtcgaacggagcccatgctcgtccggcacgcggcacatggtctgaggccggtgtttcaggggtcatggtctcgtgtcagggactcggggttggctttgtcgtttcagagatcctgagcaaccgtctgcttctgcttgctcggttcggctctctgctcgtcgcgttccagccgagacgaagtgagaaacagatggtgattggtactaacgaaaactctaaaagccgtacgtactggagtccttgttacaggttactgctctaatttttttttttttgccccaaacttatcttcgccgcgggaccaaaggcagaacgagttaacgctgtgcattcattggtcccggcaagtgaaggcggttttgggtgtgtcaatcgatgggcccgacgcgcagtgcaatcatagccatggccatgggagggcaggtgaaaaggtgaacagtgaaaacccccgcgcagaccgtgtccatggcggcgggttcagcggccgagtggttcgggggcaggccgcaggcgagacgtacgagtacgactgtacgagcgcgcacgtaccgatgaagtcgatgacgaggcgaccatcgcagtagcggccggcgggcatgccgaagaaggtcctgccgttgggcggcggtgcggcgccgaagagcgatgacaggccgcccgtgtccgagttggagtcgccgaagttgaacacggccgggaagtggcagtcgccgcccgcgccggcgtcggagggccgcagcgccagcgccagcgccagcgagagcagcagcagcacggctgctctactccccgccgtggcagtcgcggccgtggccatttccctctccctgcgtggctgcgtcgcgtcgcttgtggcggcacggtggggactggggagtgagagtgaggccggggcgcggatgtctgtcgcggactcgcggtgcgcggtggcggtggactgatgtagtagtgggtcgtggcctcgtgggttcggaggcggatggggactggtcagtggatagatagagacatcagatatgggccggcacgcacgcggctccggtgccgtggcccgtggtccgtggcgtggcgcgcgcgcgcgcgagcttggtgggaagacacggcggtgacgtgacggtgcggcgctcgcctttctcggagaagggagaacggtgtgccaccgctaattcctgtagcgtttcctgctgtttgtggagcacgcgcggcacacacctggacgagcatcccaatcccagatagaaagaacacacggtggcgtggccctgctgagctccgcatctacagttaaaccatgatctatctaaacgttctgcagacttacttgcacacgtttgcccctaaattctgtttgcacgcaacagttaatccgtgtttgtttcagcgttctccggcagcgggtcatctttcggccaagtaacgagccgttccgtggttcagccgaacgatatccgaagtccagacggggtaacgtgcggcgtgccaaagacgagggaacggcggaacgcccgccacacgctccccgagctcggcgtcgcccgggccacaatggcggccccatccgcttccgccccgttgctccgctcccacccccaccacggctcgctcttcccctcgtcaccgcgccaccgtcccgcggccgcttctctgtctgggttcccgcccctcagacccgcctcagcccgcaggctcccatacactgcggtgcggtcctcctccaccgcctcaccctcggcaccagtagaagatgctcccgcggccgcggctccgaccggggacgcggaggaggagcgggtggtgctccccaccaacgagtcctccgaacgccttctgcgcatccggcacaccgtactgccgctccccttctccccctatgttacagtgcttgaactggcctaatcgtatgcttaatttggtctcggttctcaccaaagtcccgtcactctaatacctgtacagtttagtgtctcgtcaaaactatagacaccttagtatactgtctttcacaattgttgctgtagtgcgcccatgtgatggccatggctgtccagaagctcttccccaactccaaggtgacaataggtccctggatagagaatggtttctactacgacttcgacatggagcccttgacggataaggacctcaagaaaattaagaaggagatggtgagtctgcattcctgcactgagcatgtgcgaattgacctgaactgcaaagtggctgttttaatattcagggaaaaaaatagtggcggttttgatttgtcaatttggtaatttcaattgtttgataggatcggatcatccgacagaacctcccattggtgagggaggaggtgtcccgagaagaggctcagaagaggattgaagcactcaatgagccttacaagctggagattttggagagcattaaggaagaaccaatcaccatataccacattggttagccttgtaaatcggtgacttggatatctcaaaacaagagagattggtttgtttatgctagcgtgtattgatgatatcctgcgtgtcatgtaggagaagagtggtgggatctctgtgccgggcctcatgtggagtctactggaaaaatagacagaaaggctgttgaacttgagtccgttgctggtgcttactggagaggtgatgagaaaaaccaaatgctacaaagaatatatggaactgcttgggaaaatgaagatcagttgaaggcttacatccactttaaggaggaagccaagcgacgagatcatcggcgattgggccaggaacttgatttgttctctatacaggtgcgtcttacatcttggtttctgagaaagcatgcataattatagactagttatg

SEQ ID NO: 318 - DNA, 1688 bp, Zea mays
ggtgagccagtgtgattacatttgcggcctaactgtggccagtccagttacgctggagtcactagtatttaggtgacactatagaagcggccgcgacaacttgtccaccatatatgattacatcatatggatagtctactcatttatttggtaaacaatatgagtattgtcatgtttttttggcactcatgtagtttccctgatttcctcattataacaatgattctccgtaaagaacagcactttcagttgatgacttacatatgtactgccttcttctcttacgcttgaatacaaaaaagttatatccaaatcagaaaccagattattttcattgtaaatgtcttcctgaaagtgacaatttggtatataaatgttcatgataattataggcttatggtattcgacaactcttttggccgttccaattctagaatgttgttttcgttaggagtaataacaattcatttagagatagcataaacatgaccatggagatcagttcccaaatatcttaagtatcatttttttacaacattcaatttatgatcatggagataggtttatactgataattatacacttatgatcttcgacacctcttttggccattttagttctagaacgttgtttcattaggagtaagaacatttcattcagagatagcacaaacatgaacatggagatgagttcccaaagatctcaagtatcattttataacaactttcaatttatgatcatggagataggtttataattatcttaaagatgacttccatcgctcttttggccattttagttctataatgttattttcattaggagtaagaacatttcattcagagatagcataaacaggaacatggagatgagttcccaaagatctcaaatatcatttttaaacaacattcaatttatgatcatggagaaaggtttatagttatcttaaattgacttccatcgtttctcttgctatcaatatttgttctctgttggcatcataagaattttttgtatggtttcgagatggcagtccaccatgggtcctctatacatctgacatatagtttattttcattcgagctgttgctactactcgatatgggtgctgctacataaagtcacttatacatttctaaaaattgttttaatagcaacaatttctgcggggctacaattatttggctaccaacttatagaggtatggtttctctcttctgtacttcaactacaaagtagtatttagtttcatgaaaaaaacatttataactatactacaaagtagtatttagtttcatgaaaaaaacatttataactatgtactctttttccgtagtttagacatactgccactgtattttctattgttcaacatatttttactgtagcccatcaaacattgtatctttccctgcaacaaatttacttttcacttatttctcagagaatttaatatttttttctctccgacagtactcttgcatggtttgctgatatcaaagatccttacctttttacatttaccgtcgaacgtcgtcaccttgttaaagttagcctagagtctagattttggtagtctcttcctcatatatgcgactgtcacgagtagcaatgctagtcgtggccatgggctcgaggagcccatcgtcgtcgaaaaatttgctattttagcttttttaacgtgggct

SEQ ID NO: 319 - DNA, 878 bp, Zea mays
acaagcttgtctactagtttgtgaataggttttaacttgtctatgttatcaactgcaaataacttacacttttaattgtttttacgttgtacttcataattaattgtagaacataatgatgcaaaggctatggagaaggctgctaaaagtagatccgtcaccaagccatgttcaaatgctatttatcatgtttaaagtgtgtgatgcactttgagcctttgtggcatgaatcttcactgatgcactgatggtatttctcatgtttaaagtgcatttacttcagttatgagtttagtcaatgtgttgctgttatgtgtaatgaatctgacacactgtgtattgtgtgcttcactgattattgttgaagccctggaggaagttgtttcttttgcaaatgacttgttatttattgtattgtgcgtgctcatgtgttgtttactgtggccggctgctgcttagcctgcttgtttgctgctgctgtttactgtgctcatgtctggctattgtttaatgtgcagtggccgactggccggctgcggcttgctggtgtgctgtgatgaatctgataggctgctgctggtttataatggccgttgctagcttgcttcaattgttcagtactggtggcatgtagagcagcagctacaatacagtttgtttttttgggtaaaatcgaaagccaaaccgagtttaacggttaaccgaaggacagattttcgattttccaaaccacatttagattgttgttgttttagaatccgaacttttaaaaaataaaactgaaaaactgaatggaacaaattcaattcactgattgcccaatcctactgccccgttcgagccgaatccactagaaaccgtttttatgggtattatag

SEQ ID NO: 320 - DNA, 2147 bp, Zea mays
ttatggagaaatttgataggggctataaaaccggagcggattagagttggtttggtgacaaaaaaatagagaggattcatggtaacaaaatcctattcaaatttgagaaaaatagtaacaagatttctcccattaattcccaccattttccaatttacaaaatcagcccttgctcgccccgccccgccccagctcgctcgcaagtcgcaacgcatgccctctcccgagtcctgcccctaccgacggtaccgtccgcgtccgcccgctccgcctcccaaacattccccccaccccctacgcgcgcgagcctaaaaccctagctccgtgccccgatcctccttcccgcccatggcctccgccgacgccgccaagcccgcgtccccgcccgccgcggatccgcccgccggcgacgccatggatgccgaccccgcgccccccgccggggaggaggccacgccgcagaagcagcagccggagaagaagcggcccggccggaggaagaagggcgaggcggcggccgcggcagacaagaagacgccgccgtccaagaagtcggcgggccccgcgctcgagcgcccgtccagggagaggaagacggtcgagaggtactcggagctcgcgccgcgcgccacgcccgccaagaagtcccccgctattctccaggtcagccagccgttagcgactcctccctctcccgctcgggcatgtcgcgcctgcccctgatctgttgttttcacgcggcttgcgtcccgcctgctgtcccactagcagcttgctaaaagtcgctactttcaaggatgtcctgactcttggaacacgcccttttccatgctagtattgccgtttgtgtttctgactgggaggtttgttcaatttttgtcctttgagctcatcttttcgcccccgcttttgtgctgcagggctccggaacgaagctcaaggacatacccaatggtaagctcgacctcctgaactatgccccactattttcgtatcactagcatgttctccctcttcgctggcatttcattgtgtgataatccctctacgctagtggcagaccattgtgtggtaatcgactgatagttctgtaaaaaaaccgtcttgtggattgtgtagggttactctcccgataaccctgcttttgatgtgtatcatatgatctttcacaccgtagagttttgtagagtgaagctggttctgcctggtaatccgatgtagagttgtgtagtttgacgatggactccctaaatgtgacatccttgtcctacatgttcaccttataaacagaccttctaatcagtggcatccaatttgagcacggcttttaagactttatacctttcttataggtgtctggctcttgtttggagtttggacttatcatttgtgtgtatttaggaatttaaactggtgcatgtggtgttgatacaatgcaaaagaatgaatcaataacttgagatacatttcacaagcttagtcccataggttgtaacggataatgtgctgctgtccagcctgataggttcctaagggcactaattgtgctgagttgacgtatgagagaaaatgacatccatgtcaggttccaaattagtcaattcttgcactgaacttatctatgcgggactggtacccatgtgcaaaaacaaaaaatgtctctgcatgcccacagccgtttcttcccatcgccaaataaaaaacagtccatacttgcttttgcccatctgttttcctcacaagcagaaaccagtggttctccttcccttattttaattgtcacgatttgactcttgaaatgagtcgattcattgtctttttctagtggagttactactccttagctcgtatgtatggtggacagggggctggtgacgatagtttcggcgtcatatggtggtgactggagagaggagggctgggagccaagggagctcgacaacatattgttgccttgcttgcctttctttattctttgcagctacttagagccattgtagcaccattaaatctctactaatataaagtaggagattttctgtgtgtcaccctcccgtgtacctctctgtgcgttacccctccttgctcccctacggcctttaaattgtaaaatgatagaagtaagctaaaattatgcacgagtgtgg

SEQ ID NO: 321 - DNA, 2247 bp, Zea mays
cttgcttttctatttttggaaataaaagcatgaaagtgcaagcagaaaaactatctagtctggccaccccccgcaacgcgcgcgcggccctcctcgtcctcctcctctcgcctctcccagcaggccgggcagacccccggccggccgcctagcttgtcgcccgctccttgtagctcggatcccgcgcgtgcaataatggccggcttcatcaaccgccacatcctcccgccgttccgccggccgccgctgccattcttccgcccgggtggcgcggggtcggcgttgcccgcgggccggcggccatggacgccccgtcgcatcctggacccgggcgacgacgccgtgctccggtggtaccgcctcttcttggtgacctgcctggtgggcctgttcgtggacccgctctacttctacctgctgcacacggatgggctggcggcgtgcgtgtccatggacatgggcatcggcgtgctggtcaccgcggtgcgcaccttcgccgacctcttctacctggcgcacatgatcctcaagttccgcatcgccttcgtggcgcccagctcccgcatcttcgggcgcggcgagctggtgagggaccccgaccagatcgccatccggtacctgaagaacgacttcatcatcgacctggcagccatgctcccgataccgcaggtccctaataactatagctagctagctagtcgatcgattggattgggaattgggattggatatatagcttagctagctgatatgatgcatggtatacctatattgtatgcatgcagatgatcatctggtttgttataccagctgtgagtacatcctcggccaatcacagcaccaacaacacgctctccatgatcgtgctgatccagtacataccaagagtctatctcataatatccttgaactccaagatcgtcaaggcaagtggagtggtgacgagaactgcctgggcgggggcggcgtacaacctgcttctctacacgctggcaagccatgtcctcggtgctctctggtatctgctctccgtcgagcgccagtactcgtgctggaaggaggtgtgcacgagcgagaacggcaccacggcagagatgcctaccaggtgcttgttgagctttctggactgcaagagcagggacaaccccatacgccagacctggcataaccacagcgcgatccagaagcagtgcatgcttccggacgccgaatatgactacggattgtttggcgatgccctcaacctggaccgcaacggggtcggcttcatcgataagtacctctactgcctctggtggggatttcggaacttgagttcctacggccagaacttgcagaacagcacctacaagggcgagaccgtcttctgcatcctcatctgcatcatgggcctcgtcttcttctcccacctcatcggcaacatgcagacctacctgcagtccatgacggtgaggctggaggagtggcgcgtcaagcgccgggacatcgaggagtggatgcgccaccgccagctgccgccggagctccaggagcgcgtgcgccgcttcttccagtacaagtggctcgccacgcgcggcgtcgacgaggagtccatcctccagtccctgccgctcgacctccgccgcgagatccagcgccacctctgcctggccctggtccgccgcgtgcccttcttctcgcagatggacgagcagctgctggacgccatctgcgagcgcctcgtctcctcgctcagcaccaaggacgcctacatcgtccgggagggcgaccccgtcagcgacatgctcttcatcatccgcggcgagctggagagctccaccacggacggcggccgcaccaacttcttcagctccatcacgctgcgcccgggggacttctgcggcgaggagctcctcacctgggcgctcatgcccaaccccagcctcaacttcccgcagtccacgcgcacggtgcgcaccgtcacggaggtggaggccttcgcgctccgcgccgaggacctcaagtacgtggccaaccagttcaagcgcctgcacagcaagcgcctgcagcacgcgttccgctactactcgcaccagtggcgcagctggggcgcctgcttcgtgcagggtgcctggcgccgccacaagaagcgcaagctcgccaaggagctcatgaagcaggagggcatctgctacgacgaccaaggcggcgccgcggcggacggccacgggacggacaccgatggagacagtacgccgctgctcggct

SEQ ID NO: 322 - DNA, 632 bp, Zea mays
tcaatcaaagttccgagaatcaaagttccaaagccaggcatgagctcatctctagagaacacacctgctgtgaattgccactcaggcctcatatccccaaccattacccctactcacacctattgtatctagataaagctgtacttgtttgactacgtcaggaattctgagttacactccgcaacatttatcatgatcagacttttttcatatttcctacttgagcttgttgccttttggaatgcttctgtatgttgatatgcgcccgagtttgagcatctgctggatgcggtcggcatgcatgctgttcgttttgttctgcgtattgctctttgttcaactcctatttcctacataactagcacactcctatttcctacatattttccccttatttatacatgttgcctccaggtatatgtttttcggttcctccagttatgtacatgttgcctcctctggtagatgtttcctcggagttccctacatgtttcctcaattcctcctgtataatgtttgccctttttttgtatatgttgcctcctggtgcatgtttcatccatgcttcctccgctttattcatgttgcctccattataatacctcagttattataatatgcccactccgtta

SEQ ID NO: 323 - DNA, 1274 bp, Zea mays
gtctaataccttagttattcctgtggacgcactcagttattctctggtttcttcccttcgcgtcctctcccgccgccgccgccgttgaccagatgggtcgcgtcatacgcgcccagcgtaaggaagccggctccgttttcaagtctcaggaggactggtcgtctcagcgaacaggctgcctcagccgcagcaaagtccgacaaggccacttagacaacttttgcggttgtttcaattacattagttgatagtcttctttgtgataaaacagttaaagctaaatatcaaaatcatatcaaagaagctgtagatttctgaaattttgattaattttctttttagcaacatctgcaggcactctgtttccaaatatgccgagcatgacaaggagctgcaaacccggtgcagcccacaactgaaaatccaacaagttcttggcctgctctgagaaggttctcccaagtccatcttcaaaagcttcagcagatgaacaatatgtcaaaatgtacgaagtgctgaaaatagtatctgaaaagtttcctctgagacagaaaaataaaggtggtgctagtcaacagaccaatgaaggtggtgctggtcaacagaccaatgaagtacctgctggacaacagaccaatgaaggtggtgctggtcaacggaacgatgaagtacctgctagtgttaagagaacctatttcaccgtgactaacattgtaaagttggctcaacattcggataacgaggagatctccatgcacatggacacagatatgctcgtcagacattttttcagtgtggtcttaaataacctgctactgccacaaaagtctatttttatgtaacctcacctgaacttcaagctgtatatgacctagaaaagttgaaaaaggttgactggtcatatgtgatatttcattcattaaagaaagctcttgcactgactttaagaagaatccggggcatatgaatggatgtgtccttatgtttctagtaagtaccaggataatgcagagcatatccataattccttaaagtaattgtttttctcatgttgggtaggaaagtgactaagtgaagaatcgttggttcacaggttgttttcatggactgtattcaaaggaacagcttggacacaatgttgcagaattaacctgtatacggaggcaatggtcgataaccttttgagtgcaaaaccaattaagaaaatcagtaagaggacaaaaagggtacgaaaaggaacctttaagacattttgactgcatctgattgttgca

SEQ ID NO: 324 - DNA, 979 bp, Zea mays
tgtccctttcagctggctgcggaggaaaaggaaagggcagcagaggcacagaagaaagtgatgttgctggaggatgttgatgtaagtactattctattattgttctatgaggtgatgcggaagtgtagtccaaagaaactgactgcacccccttgatgtcctttttagttgattagctgggaagatagctgcttcagacaatttgcagtgctgcatgagaagtcttcttgtaagaggtaaaactagaataattgttaattttttaacctctattgcaaatttacctaacctctgtttcaacttttttagcatcttgacataaatgatgcagatagcatatacaagaagcatattttagaaagatcccacaacagaattgttttagactttccttcctgtgaagtacgggaatctacttttattaattgtttgcaaccatgtggtcatatgcattcccttgtatttcatttggtatgcgaactatggtcagtggggtggcatgataaaattattcttagtgaaggtgctgtggtaagtacttttacctatgattgtcatctcaaacttagttattgttattctttaactatggttgttgtatctttgattgttattccagaatgatttgttgaataaagacataataactgctaaaagtctgaacagggagcttactccaaataaagtgaggtatgtgaatcaggtttgtgctctttgtatttcaatgttactgggaaagctctgtatttctcaatgctctgtatgtctaattgttttttccccagatttttgttcctatagtttataatcatcattggtcgctagttgttgtttctactgtgcaaagaaagatatatgtccgactcttgtcgaggcatatataaagaggtgccaattacgttgcttgaaaaactgcagacgtttttgcaacgtaatcacatggacatatctggttatgatacgtggacaagttgtcgcg

SEQ ID NO: 325 - DNA, 1296 bp, Zea mays
agcctaggacagctcggccggaatgcagagcacatagaaatcctcgtgcagtccgagcactccaagaattctccagattgagtgtaacaagagagcacactgcataactgttaacacctctctgaatgtaaaactatatatccattcgattctgatcactgtacattcctattcagcacccatcctttttccgtgtcagcgtcgttgctgcatcagtgtggtgtggcactggcaacctctgacaaagaacagcaggtggctggcggaagatgcgcacccaacacccatgcatgacgcatcattgaaaacaatctgtccgttactgctcaccacaccagtacgcattctggcacacatcgccacgcaaagaatcttccatattctgcaaccttatctctggcgatgttgaggtggggtgtcgatcatgtcgatcattcaggcagccgaccgacggttagaagtccactccaatccattcaaccagtgaccaaaacccaaacaccaccagcaccgccaggccccgtgtgcccccatcactgatcggtgatcgccccgccctcctccactcagtggctcactcagtcctcacgtcccgggtcatgtccatgcttgccgttgccgatccaacgccggctgcaggggtgtctgccgtgccgggatggcgcacctgaaaccagcatgcccggcgttcggcatccgtgtctgtgcaacgctctcggttgttcggatccccagctcccaactgtccgtcgcgctggtcagctggtgcgctcctgccgctgccgcctgatccgtccacccgccgtccgtccgtccaaaaagctcgtgctggcctgggctggctgtattcactgcgtgccagccagggtgcaccgccgccgtagtagcattgaccctgacagcttaggaatgacaccagtaggcgacagctgcgcaggagcaggcggatgttcctgttgtttggtagcgccgccgtagtagcattgtagggccgttgtttggtagcgcccgcgtcaataatttaaatgatgatctcgcatgcgtaatcaattggcggtcggggacagagttagcgaaacccttgctgatgaaattttgaaactcccacgcaagttgaactgtgtacgcacttgtttattttattggaaatgtcgtttcgaaataaagcatttgccaaggttgttgaatagtacagaactcattcagttattgtttggttcttttataacgcgacgaataactaataacattaaatcatgcttatttaattttaactataattagatatcatgataa

SEQ ID NO: 326 - DNA, 4201 bp, Zea mays
caaagaggacgtagggtattacacatttgcagctcgaacctctataaatctcatgtgtgtggtatctaggcaacacccaggatcagcaagcatccagcctgctgccctctctctatccttctctctcttggatacctacggtatcgtggtgtcgttacccgacgacaacatcttagttcaatggtccatgtccagttcaaatatacatacagtaaaacaacctcgcatccaaataatgataattaaactaacgcagtctttaaatgtgccttgcatgctcatcttgcaaaatccttgagcatctatatagtaacggaaggggtgcaaatacggaacaagaaatttgtattgtaggcaacttacttgcattttatcttgattttcatccaatgccgcagacagagcctcagcagaagcaacacgaacattgtaatttttatgggaaagtgcattgaaaatatcagagtaatcggtgatgacatcaaaaccaaagcggtcccataactcctctgctaattcagcaaccacctagagaaggtacatgagccaaagaacaagaaaataaatataatttcttgctctagaaagaaaaaagttcaacatatttcactaacataaaaaaaagatcaatagttccaagttcaaagggatgttacaaaccttctcaggatcatgagcagcaatccaaaggctcgttgacacatgcaaatctcgttgcacagagtgcacaggaacacattttatagcagttaagcaggcaagcctaacgtgcacttcttttgcatatacaccaataaaagcctgaagaaagaaagaggtaagaatacatagcactagatgaaataaaatagaacaaaataagctgaagaacagaatacaaaataacaacctgcgctaactcatggcttcttagacctaggcatagctcattcagcataggcccaactgaaggatgataagcaggaacagtgcttagcacatgataaagaacctagccatagaaaaattaagatagtaaattctagaactaggagtctatgagaacaaaacaaggaacatcattaagtctgaaagaactaagaatgtttaactgataacatcctaggacgaggaagtggtagtattggatccatatgcaaagatagtacgtggagcacatcatcatgaagacacgtcttttttgaagatagaaggatcctttccatgatctgaaccaaatggtagcagcataaataaataaataaaaggacaaaaacaggttaaagtaaatgttggaagggaaatatcaaaaggaatagaaagtgaatttatggttggactaaagacagtggacaccataccggaaagacaaaagtaaacgaatctgctggaagaggacctgctttgcacgcaatagtcagaccatttactatttgttcaaagaggccagatgatggcttcttgctatcatcttccatgatcacaggggtaagatccaaaacgatttcaagatcaccaacagatatcacacgaattgcagcagcaatctcgggtgcccaattgcaaagaggaggggctgtgcaacgagctagcctcaacaatgtacaaaatgcagcatcgcttactattgcagaacttagcaaaggttcaacataatttacctgcatagcacaacatcaaattctgagccacaacagatatgataaatataaatgtagaaaatgcatcactactaatagcagtgtctcatgccaaaaaatgataacaagaggatataagaacctaaaaggtttctccaagatatgttccatttcactgataaccaaatacaaatttcactattttttgactggatatatgagggtcaattattacatacttgattatcatgatttggctgttcgtaaaagatactggtgcggaaacaaaataacatattggtgcatttattaagacataaatcataaacatttccaaaaacaaaaaaatgtaaacctcgctgcagacacaaaagaaaaggtcattttttgttcaaattaattcttatcgattattcgatttttttgggtagctttctaggtttaaaaaacgatcttaattaaacaagatatagccaatgtgttcaatatttactcctagatgtgcacattactccctctatctaacacccttcaatgttgtgatgaagttctgccaagcatggtctatgggctggcaacatagtaacagctaacagtaaaaactgaaagaaactacagagggaaggaaaagattgctaaccagagatggcagttgaccatgagtaaatataggattagcaatagccaattcgccaagagcatccaacattaaggagagattcttctgcacttgcccaaccttcatacgtacagatgcttcctccttcaagagcaactctctggcctcctctttagcagtcttagccttgtctataggagctggaaatattagaaaataaattttcaccaagcaacacactatgcacctattgtcagggctaagaggtcgaagtaccagtcttctttgtagatttcccagcttctcgcttgccagtgcctgaagattctctcttctcattctttgcaggaacaacagaccgagctgtctcctacaaattatagcaacaacaaaatttggcatatacaatagattaaagccatattcactggctatcaaataataatactagattgcacatttggtagattttctttctggcaaagacttagaagctacaagttcatcacaaactacaatcaaaatatttaaaaaaaacaacttgcaagaacaaaatattactgcatcttgatcatcatatgcacggaaacgcccctttgcaagtttagagtttttggaagcaacagtctcagcaatgtaaactccttgctcggttgacaactgcccctctggagtatagaatatctacattggaattagaagaatttgtaagaatatatgctaaaaaactctagctaattatgaggctagtgatagaatgcacaaaagtaaaaaatagtagaccttaattgcacacaagctaacaaccttgcataaaaactataaaccttgtctgtatgtcagcatttaagccactccagaaatcatggaatgcaagagctttagtaccaactagtatctcaaaatattctaatgcacaaattatgcagtgagacaattggtatgccatattcgagaaaaaaatggaggattggtatggccattgtctgcatcaaattgtgagagtttgtagaacaaaagaagcaacacaaaccatctgtgagagcagaaccaaaaaaaagaactttcatgtataaacaaaaaaatgaaaaatagcactagaactataccggtaatgtagacatcaaatagagtttgagtttgtgcgaaaaaatagtttgagtaatttggaccattatgacctgaatttatggaatagcctaacgaaaagacttctaagaattttatttatttcattcagccaaatttcaaagaagtcgtcaaagcccaccttaatatcagtctcagaaaaggaatcatgcaaggtgtgctcctggagtcctatgaagtgctggaaaaataaaaatatcaataaaatgtcagggaaagatattagaacttccatttgggataactaagtgataagataaccttctcaaactctagaaatgtttcattaggagtaattgtcataaatgtcgacagcgaacgtaatgctgcactctgtacttgcttgttggaactaaatagaccgtcctgtgaaattaattcctgaacaacaaatatactggttaagtggttattgacttggatggtatgtaacaacaatactaaaaagtggcacaaataaagaatgtgacagaacagaatttccataaaaggcaatgtatagtagcgttcaaaatatattttaaaaatgaaaaggtctaaattactcccgataaatatggccaatgtccagatggccccactaaactagtgtttgcatcaatttactctcccaactatttaagttggtccaataccccttaacaaaatttgtcattttttgtttcttcgcatacaatttgagccttaatttcaaaatttgttagatgatagcaaacattatattttatgttaaaaaatactaacctttcattattaagtttgtataattttgtaaatcagagtgtttatctatcattaaatgtcctggcctatc

SEQ ID NO: 327 - DNA, 1526 bp, Zea mays
ttcaacgccagccaaggcctcggatgccacagagccgtcatccaagaagaagctcgtgctattcgggcgcgcgtgccgccccgacgacgaggctcgcgtcccagagaccctcgccgcgccctgctgcgccggcggcggcgagcaatctagcaagggcgccgcccaagtgaagaacgccgggcatcaatccatcaatgacgcgctggggcacaaggccaagactttagatgagatgcgcgaattgtatcctcacctcgtcgatgagtcgatggcccttcttgacccggcggtgctggagagggtgctaccccgcattgatgacaacgaggcccaggcgttggacaagaagatcaagagggcgaggaggcagctcaccaaggccatcagggaatcggtgagcaaacccttcttatccttaatcaaacttacttgggagtacgatttccctttaattactctcaactcaaggttccggccttccgtgtctttgttttaattttcttgtgattgtggttgtgcttctaatgaataaattattggactaggttgtttcaaagtatttaaccattggtgaaaagagtttggatattatgcccacatcatttagctattagacatggttccactttatgctgaaaatatagtgacaagggcatagggatggggtccaaatgaataaactacacgaaagttaaagtggtcctgccgctacttaataattactatacatgcttatgctgatttcaagatccatggtatttgtttaacaattgcattcatagataggcatcttttgttgtctggttcccagatgtaggctacctcaaagtattttactgcgattgatgccatttgatagtgaagagggcatagccaatctttgcgtacatttgtgaccattacctaaaagcattttgcgtggacattgcaaatatggagtgcatcactacagtcaaatggtgccccttatctgatgtcctcaattttcaaggcactgattgccccactttagtacagccagtgtaccgtacaacgctttgcctataaataggaaatatggttgcaagcaactcaaggtttcactttcagcatactgttccagaatccaaaacaatgatgtctatttgggaatgaaactaacagaactgcgacttaagtatactaatataaacttcattgtttgaagcaccatactctggaaaaaatggaatttgtgacatcaaactctgcaaataaaatgatttttttcaataggtagtcatcatccctttgccttggaaactgctatgtgtaccagacttttttttctgcccttctagtttgcacttgctctgaaatattttttataagctgaaagatgcattttacatttgtgtcaaattaccccaccaatcacaagaggatgatgttcaggctgcatcctgtctgacttctaaacttcgggtgctaatatatcttttatcatcactagtgaaaccacatgttgccaaaataacactagtctataaactcgacctgcaggggga

SEQ ID NO: 328 - DNA, 1456 bp, Zea mays
gctccattctagaaacgactttgtccaaaagaatttagaaagccaaatggtttactatttaaatataattttctttttttaagtcactctgtactataaaaaattaattcaaacaacaataaattagaaatagacgatttatcacaccgtacttcggaaccaaacagcaactaaaaaaccggccggtaaagtttcacctgtcgaaaaatgtaagaaccatcggccatttaataaagaggccgatcagccatactattcgagaattatttaaacattcggctattcccatattctacaacatttagtgggtgatatcatcagctgttgattatttatttattcccgatgtactgtagtctgtagaccattatttttgccccgatggtctaggttatgtttagtgattgtacatttgtgccactgtttaataggagtagtactgtacatggcaagaagtcaagaactgtgtcgatggaactatgcaatggctcctgcagcagtagcagtagctagtataaatgtgcggcaggtacgcttgtcgtccaccatctcagctgatgaattgatgatgacgatgggggacaagaaagacaacgcacgttgtgaagagttatgaattcctatccagtccaccagacgcagtaagactgtatttgatggatggcataaaatatagatattacaatgttgataacactgtttgtaaagttaaatttaaaatagagataagatataggatgagataatctaaaatgttatagtgatgtcgtaaggattttgtcgttgttcgctaagctataactatgtagtcttacatttattttgaactttgtaaacagcgtaatatataatacgattcattattttacactatgtggacaacctgcttcagttgtgctttctttttctctcaccaaaacacctccatagtctgccattgaattcaataatgttgttgagacgtgttatgagttagaatggtgccactataggctataggcctctatttagaacagtagttctagttataatttacatataactaatcttaaataaatacggtttcaaatttcacttaagcgtggtttcaaattttagagctaaccttcgatatatctaagaatatcttaccacctatttaacctttgatatatctaagaatatcttaccacacattttgtctaagaaaatttagctacactttgtcattttataacatgtacagtctaaaggaattttatttaaatttagtataaccaaacacgtgtaaacttgatcaaatttatatataaaaaaacaaaacatgaccagcaaacaaatacttaaggtctcgctccttggctcaacccgtagagcccgtgaattgaggtcaagaaaagctaaatattttttggtagagctcttccaatttctaattttttttgtctgaaataattttctatggttttctaggata

SEQ ID NO: 329 - DNA, 3755 bp, Zea mays
ggggtacacagtaagctggacgcgcgaccgacgtgtatgtacttgctcctatgtaaagctaaggctgcccccgcgcgcgcgcacaggcacagtgcgcaagctagctagcacgtactatagtagagttcttcgtgcgaactctacgcttgacatgagatcccggcctctcactcgcgggcgccgcacgtggcggcatgcattgcatgggcacagtctcggctatagctagctagcccctatgaatggacgcacgagatctgtgtggtacgtgctctacgtatagctaggaagcaggtcaggacgactgagtgaggagtagctcctcgtagctggcggctggcgcctactccggccaggggtattccccggccccgtggtacgtagtggtaccgcggcattatcgcgctgtctctcgcggggcaggcaggacgccccccgcccgtgtcacgtccgcgtcgacggacgcagccgagagcggctggttggttggcctcgtgggcgcgcgcgccgacggcggcgtcgtttcggccgctgattggctccggcctccggtccgccggggacggacggacgctccatcgatcgctgcagctcgctctgctgctcagagttggtgcacccgtacgtacgtgcgcaggctgaggggtgcgtggaggcgtccgtgtctcgtcagccaggcacgcagcaccagcgacccatcacatgcgctgatgcattgcacacacactactacagcggtgcgctcccaagtaccctctccctgtacgtgcgacatgacattcctgttaccgccttcggcagctgcaagctctgctagctacacattcctgttacaaccatcttctgctacatgttacggatcgacgcaagaagaggatggggccccgcccagccttgttggttccatgccgacacgggagcaacttcttccatcgggtattgttagaccacacgtacgctagcttgctgagaacggccaggccacagtcgtctgatggatggtacttgaatttcttgagaaagagaaggtaccgtacacgtgcaaataaatgtcaaacatgaaaactgtaaatattaacacggcatcaggctacatgaacactcttttttctctcccatgcagacaacatgatcctggcaaaccatcatctacgcgttgtgtcagagaggcagaaagaggagcctcaacattaccacacgtttgtcgggatgcaaatgaccttcggtgagtgcacaataaaaccgaaacaggttaatctctctcagggccatatgttggtccatttctgcaagcgaatgatttttcatcctcttgccatatatatgaatcatggtccagcatatgcacaatcattttactgtttgcaagtcatatggcaaaactcacacaggtcacgacaagggaggttttacccgctacatgtatgtgcatgcacagtcaagttttcattctggctcttccggggccacaaagtgaacaatggacttggattcagatcacaagctgctgccagccttcatgtgcgtttcgattatgacatcaatgtgtctagccgaaaacagaccagaacaccaaaccaaattatttagcaaccccacaagagagccttccattttttttttttgggtgggtgggtgggggcaaggtttcatggatgataaggagaaaaacaggaaccctattgacgaggcatcatcctttgaatcttgttatcacaaaccccagagagagaggatcggatgcatgttaagataagccactttaacccccactccaagagaagaattcctcccttagtccattctaccttgttggacctctccactccacttgcacatcttttctccccacactgccgccaggatttctgcccagcctgtatcaatatagaaaggctttagaaatgtttacaatttacaagaacggcataaagtaggaacacaaaagttccgctgggggtggggtgggggtaggacagcaatggtgaatgcagaataaaaaggcagaaactgcagggtaatgtgggtacacacgacaactaaatcaatttgcaaatatattgcagaataaaagaactccttgaaaaggcaacgtgacaacagaatatgttccaatggtgaatgcatctgccgggactaatgtagcaagtttgcttggtgtgggcatatgtgtgtcatgctcctcactgttgtgccccactaccagctggacatggtgctcctaaaatctggctatgtgtgaccaccgttcacctagttgatcagatagctggcatcttgtgatgggcacacaggggctcacctcctttccattctatcagtcaaggctacatgcttttatcaatgatatgtgaagaaaatgcaatcaactacagttggcttagaagccataagatttgcttccttcctagatcttctttacctgaaataaaatttctaaagtcttcctgtcaatatcttgcatcaacagcaaagagatgatgtgcaggtcaaaaacttcttttttatgcagagatagtttcagcagtttgttctatcaatttagattgtgatgagcttgtaaggtaccagtattgtatgattattcctaaaagatgaacatagtagaaacgacacaatggtatttgcttgataaaattttgagaacatttaattcactgtggcatggcattgaaagcaatcaggtgtgttcagaaccttatactggctcctaatgcaggaatttattccagataatgatgggtgtgcatttaaaaggaaaatgccaaaaattaaagtcctcgaaaaagaagaggtatctgtctctatctgccatgatgatcagcatttgccatatccacatctcggctgtcagccacttgagcaattcatccaaacatcaacagcaggaacaatcatcagcacaccacaccaaactgaaccctggagaatacatttggaactgtgattgctattatgccgtatgatgaaatcaagtatgaccttgaagtatacaaagtgcaattcaacattaacaagtacagacgactacaagtttatgctgaagtgcaagtcaaagccttacaagaaatataccttcgagaaacatcctctctgtctaccccaatctccttttgatgacatctaaggggttttctcagacattaataatgggctgaagcaaatgcatccaaagactggaactatatgcaagttgaatataaatgatcaataacaatgtttgataaaaaaaattacatggaaggccccacaaacaactcagcaagaacaaagcatcaattatcagttcgcttttcatgacaagcataaaaggtaattacagttacagggaactctttatgccaagtacgacaaaggacacagcaaaagtacctagctaactaggcacgcaaaggacatgtagcagagatgaaccgaagtgttaccaattgactaaacatttaaattatttacaccaaatagcagctccgcaacagcagcatgcaaatggtgagcagtagcatatgatctttcagcagtttgatcccatcctagcaatgtaggagttggtgaccctaataattgccggttaccaccaagcacaatgaaaagctgcaaacctgctgctccagaaaaggctggcaaaatcactaggttcatataattgatcacagtacacctcactgaggcagaacactaggccatttctctatcagtcaaactaacaatctgctactctgttccaaattatagttcactttatcttttcgaagtta

SEQ ID NO: 330 - DNA, 2752 bp, Zea mays
tagagcggggcgtgacgggagcgtgggtgagagagaacacgtaggggatgcctttgaggcccagcaagatgttttccttgcttccttcatctagttacatggctcctatatttatattccctaaaggaattagttcccgagcaaactaaaaaatgaatccttatagatttggactctcctttcctaacaagaaaaccttatagattggactctcatttcctgacaaactaattctatttcctaaatgggtactattcacattgagcgtagtttgcgggcccaacacctgtgtggcccattttctggcaacataggagataacggtcataacaagctaccacacaaataaatcaggtaaaaaactattattgcagatttaagactcatgccgtatgtcgaaaaagctacctacaatgcacaaagaaacacaatgaatcaaaacatctgtgaaaacatatttgccaaattccttgtgtccacattacacttacataggaaaatgtggagcttcctggaacatcttgccaacattggagtattttttcttttcatcatatgcaattcctttgcccaacccataaccaaagccaattcccacaccacatccagctccaactccaaagcctaatgtgagtccaggaaatccatagcctaaccctgcacctaaagtaatcatggagaaaaatataagtgtgcagacatatagtattcatgatgaaaaacaaattattctcaacatcttttctatacaaagtgtaagataatagcgcaggcacatgaccattaagtcctgtaactcctagtatcaacaatctagaaacatattaagttttgaaaaaaaatgtgcatattatataggctctaatgttaggtgtgaccgtgtgagcaacaagaaccagttgatatgtaaaaatcattttatacatttatgtctctggagtctggagttcatgattcttcataccatattttatctttcagacataaatcctgtgcttaagccaagtgcccaagtgcgcatttcagctcctcaaagttcaactacaggtctacagcaaagtcattgtatccttcagtcttctatatatttagatgtacactcacctggtgccatgtggggaattcctatgtatagtttatgccacagtgtacacatacaatcactgcctcagttcctaccctgggccttccatcccctcaaatataaaacaggatctttcatatatttagttggttaaagtggacatcagatccgtctgacactgtatcatatttttttttaaaatctgaagtggcaggtactaattcatccactcattttttttcagaatgctaacaatatcaacaatcactatgccactggcattaggcattgatatttttttgctgacaaccatgcacatgtataacttggtaataatgtatttcaattcaaaaatgatgttgtaagaacatatatgcttaggagtacatagtttctgaatacgcataacacagaaaaataagaaagtagtaaacccgaactccaggagttatacattttttttttgtttcgaggtgacacaacatttagtccacaaataatcagcaaataaccacagcttgtttgggaagaataactatcctaacatcattaaggattaagcagtgaaacacacattgtctcggatattcaataattattctatgagcaccatccagcgtcacccggactgccagctagtgcctaagtttttcagaacgctgcctataatgtgaaaaaattggagccaccagttggcaaaaacataaattgttaagcataatgccttgactgtcaagttcccaacctaggatgagacattttaacggaactagtgaatgttacaagaaaattgtgaaatatcttctgataagattcctgatttaggactgtgaatcttgtacaattgcaacaatctgtaatcgataaaccctccggtaaacctatgtcctgcaaggctgatactagaacacctgtaatttaatctactaataaaccaattgaagaaacaaaaataagaatcgctaccgatgcagaaaatgataaaatctctcaggaataaattaagcaatgccagatcagcagaccctgaaacaaatctgtttgaacaacttttaattgggaaaaccatatgcacgctaaccccccctaagaagacagattgtagaatagccaacaaaaggaactgtaagtaaagtacacaccaacctattgaagctcaatctcatttacggtaccctaatggactgaatcaatcgaggcgtgaaaagaagagagcaaagcggacggttcttttagacaagaactgaccagaaaccaacaaatgctaccatttcgaggaagagagtgagaagaaggccagggattttaccaccgaagaatccgatgcctgcgccggcgccgcagccgatgccgattccgagggcggggcctatcttgccgagctccttagaggtgacctccggcagcctccagaggaggaccttctggtctcctccgcctcctccctgtttcttagtccccatcggaatcttctccccttcccagttctgcttccgcctcggctcttccaaggctttctgttccggttttgctgtgtgtttcgtgtcgaactggctactggcaggaccggtctatcgtagccggtttgtttggatttactagagctagctagtagttagtgtctaaaattaagtaaagatattcaaacattctagctaatagtttagc

SEQ ID NO: 331 - DNA, 28132 bp, Zea mays
actgtggtgagtttcggggagtttcggggagactcgttgagtctcgcctgaactcgcgggagtttcggggagtttcggggagttttggtgagcgcaaacagggcagcgtggagtccaccgcttgtctgttttttgatggtcgcccaaccgtttgacgtggaggtatttcttcccatcgccaatgtcaatgcgcgatattcgatccagttcaataagttcctggagtggtacgccgacgtcaatgttgtccatcgggaagatgttgatcttcaatctcacgatgtcatcgtccacatgaccggcatcgcagagcgtgaagttccacattccgatatagagcagccgggcatctcgcgacagtctgacgatgtttccgtctgaccaaaactcaggtttgatggtgcggatgcgaggcactacttcaccgcccggcgaatcaagccacgcacggcagcttcggttatcccgtaagcctccgcgatttcttgatttgttaggccgtgttccttggcgatccgtgcatagtatccacggtggatgttgtgcttctgatactcgtcattggcgagcgcgagaaacgtcctcgcgatttctttgcggccttccaagccgtctgtgggtacactcattagtgccactccttgtcagtggtaggccccgggtttcagtgttggtagcactgccggggccgttttatttaccactactagtatatcgaacctatgtgcgattttgttgcgctgtgggtgattgttcattagaatttcgtttttcattctttgggtcacgtcagcagcctcactagatcacccagcgtcatggtcacgtactgatcttcggcggcaccttttccgcgccgcttgtggatcaccatgcccacttgagcgtcgtcgtttaggcgctctacctcggcctcagagacccagattccaagctccaagcggtttgtgtttttgcactcgacgacgatgcgcttacccgcatatcgccagcctgaaatatcaccacgatcgttagcgccactctttgcgcgccgttcgatccggtcgtctatgactgccgcgagatgcttcacaatgagcgtttcaaagctcgttccagcggctcttgctgatgctctacttcgagtcacgattcctccatttgcagtagtcgagttcggcctcttggcgcgtgcctcgaagtggtgcgccgtcgtatttcgcggcgaacttgtacggcttcacaaagtaggatccggcaactcgtgcgctcgtggtcgttgggtgcggcttattgcaatacgggcatatggtgatcacgccgcccaccccacaacgctaggaatcccacggcggcgacgatccaagacatatgcccttagtccctcgttgcgccttagaacgtcatcaggcaacttcgcggggatcttgacattggatgcttcgagcggcttcaagaacaccttttcgcggcctgtcatgacgcgccgaaagcaggttgcgcaagatgctcgcccgtccggcgtgatcccgtggtaaacgacagtgtccggcgcttccttggctgatactccagtgcgacgcatgggacgttcgcagaccttgcagtgactcggtgttgttcttggcttaggcattacttttcttcctctcgaaaattcaaaatgttgtcgtgtggcactttgcatttgcgccgccacatccactcgccgcacgttccgcagcgggctacttcagcatctgcgtagtagagacggtcacgttgcttgcgcgctcgccaatcctcgacggcgctggttttcgtccactcagtcgcagtcatggccgtcatctgcccactcgaaacttggcggctcaataaatacgggcatcgcgtctaccggtggacgatggcacgcgcatttgtaatccttgtagcatccgtgcgcaccctcgcagcagtagtgatcgcataggaatgggctgtggtatgtggcctcaactttgttgctcatgacttcctttcaggcataaaaaaagaccctgtgcgggtcagtggttgatttgatcgcgcagcttccggttctccgtggcgtaccgtgcgcgcaatacctgtaggagcagaatgtactccttggccttcttgagtttcgcggtcaggtcgtcaacttcagcctcccattggtcattggtttgcgggtccgtgtcagtgccagcgagtagcattccgatagcttgtgacattcgctgcttaccctcggttacgccaagttggaagtcgctatgatcgagcggcttttccgcatttacctcttcgacgatccgcgccacttcatccataaattcggtgcgatatttgctcacgtttcctcttcctttccatatcccgatcagcgcgtgcggatgctttatcccccgtaggatcagggtgcgtccgtcgcgctttatggtcgttttcttcgctggtgtggtgttcgcatcgtcgcccgtggtagcagacgccgagaccgttacgacagcactcgccgtcgcaagtcactctggatcctcgacgtcaacgcgtagggtcctcatggtgcccgtgatggattcgctaagttgccgcaacccatatgagtccgtcgcgtgcgagacgcgctgtatgcgccagtaccgctcgatggcatcacgtgcatccctgagcgctcggtatacgtccagattcgcgtctggcacatggcctttagtcgtcaccggtaaagctccagcgcttctcgatgcggcccgtcgtgatgaagtcgccgctcacgggataagcgatcccaccgcgtgcgtacatgtaattcagttcttcgcacgtcacttcatcgacccacagtgcgaggtgtgcatcttcgtcaatctcattcaaagcatgtcctctcaggtacgccaatggcgcgcccgtcatgagcgcgccacggcataaaaaaagcgccacaaggcgcgggggttgttttgcgggatacaaggctctgtacgtgtttatgtacaggtttagaacggcggcccatcggatccatgcatgccggcgccaacaacttcccagccggttgattcggcgtgggattgattcgtccacgcgtcattcgcgggctgttgctgcgagcgttgaccaccgccttgctgagcgcgagtcaccttcgccgaagcgaaacgaagcgatgggccaatctcttcgacctccagctccatgacggtgcggcgttcgccctccttggtctcgtatgtgcgggacttcaagcggccttgagcgatcacgcgcatacccttggtgagggtttcggcaacgttctccgcagattcgcgccacactgaagcgcggaggaatagcgcttcgccgtccttccattcgttggactggcgatcaaacgtccgtggcgtcgatgcgatcgtaaagttcgcgacggcggcaccggacggggtgaatcgtagttcgggatcggaggttagatttccgataatggtaatgatggtttcgttcgccatttactgctcctctttcattgcgtcgtatgcggcatctgctaggtcccagatgtccgtttctcggatttcgtctgcacttgtatcttctaggtgatacttttcaagtcgtgcgaggtttgggaagttcactcttcctccttgcgccgcgcaacctcggcctcgataagctcgcgagcttcggggttggtctgccagatgttgcggagctcttcggcgttcttcgttggaatcactgccgcccaatcaatcgtctgcgcaaccaggagcggcttcacggtgaacggtttacgcttgccacgagttgccgtgagtgaaacagtcacaggcttatcaatgtgcgacatgtgactaatctcgatgccgcccaccgtctcgccgccgaacttgatgtttgggttgcgaaacagtgtgagagacttgcccacccagttatctgattgcgtgccccagatttcagcgagcacgcggcgcattgacttgctaggtcggtatgcgcgctttggatcctcgatgatatgcacgttgaccggctgctctggtgaaccttggctcacctttgctacggtcacagtgcgcggacctgcaaccaggtcatcggcattaatttggtcgcttttcgggatgatgctgctcgaaatatccattagaactcaatctccatttctgcccaatggtctatgtattcggtaggcggtgcgcccttggtcgcatcctggaactcgtgaatgcacgcgaggatgtgaccctcagcgtcatctaccgcgtcagtgattgcctcgaaccaagctggatccgggtagacgcgcttcacgtacagcggcattccaccgcagtagctggtgtagtcaatccacttgcggccagtcacgagtaggccggtcataagttgcgccatgttctcagcgggcacctcgtcgcgaatgacggtttgtagttgaatcttcggctcgcgtgacttgatttcaatcaggccatcatcgccaactagtccgtctggcgagtatccaagcttgaagtttccgaagtcgcgcaccatgaagccaacctcttcgacaggcgcgaatgtttgcgcgtagacctctcttgcgaatggttcatcaagtgttccgcgtatcattgcgcggctagggatgatctggacgacgcgcttcgtgattcgttcggcagcgattgtggcgatgagtgacattgccgtatcaccgtgggagaacgtgaggacgctttcgtttagctctcgtgccttagagctgcgcgagctgtggagcgtcttgatttccttggcatcagcaccagccttcgttactttgcttaggcatggcgagaatgcgagcgctccacactccgggcagtcgtagttgatagcggggactgactcgcgtgaaatgagttgccctacgacggacgcggtgacgataccggcacgcgcttgaagccattctggcgtgttctgctctagctcgcggtagacggtgaggttgtcgctcacggggtcacctcgaagatttcggttggtagccattcttggatgtcattgtcgcggtgaaattgagcgccgaggatgcgctcgggcgaaatccaatcactatccacgtcgcgcatcaatcgccacttgccctctttgccgcgcaccttcgttgcgatgatcactgagccgggctcggttggcagggtaggcgttggacggtgcacgaggaaacatgtgtacctatttaaatggaacgtccatactgtcccactgccaacctctaggtagagtccgtcagcgtcgattgcggtaaccttgccctcggatgtgtacctcgtgtcgagatacacccattcgcgccggatcgtgtcaccgacgcggatgtcctctggcctaatttccttttccataactctccctttcagagtgcccacgccgcgatgcacggcgcgagaatgacggtaaaaacgaaacccacgccagcgaggacgtgggttaggggtgggtagtcggtgggggtcatgcggcggcctccaaattcttcacagccgttagcgccgttgggtcactgatgattccaaggatccgcagctcggcgaagaagtcgaactcttcggtcatgcggtccatgcgtttctttaggcgagtcgcaacgcgcttggcgtattcctcgttgattccagggcttgcctcgatgatgcgattcttgaagccagttactgtggacaattcgttttcgggcatggcaattagactccttatctgcgctggacccgtgggtcgcagtcggaatactgcttgggggtgtttgccggagttaggcggcgtcgcggaggtggtcaacttcggttcggtcaaatcgacgctggttgccaggggtccgggttgcggcgatcttaccctccgcttcccagcgtcggatcgttccaactgtgacgccgagcactcgggcgacctccccgatcgttagttgttctggtgtttcgttcatgactagaacctatccaaacctaatcaaacctgtcaactgaaatacgggtgccggtcgaagtctgtaggaaacctacaacggctagatcatggcgttggcgatttcatccagcgtctcgtctcctacgacggcatagtgagtcacggtctgcaaggatgaccagccgaacgcctgcgctacagcctgcgggttgcggaccttggccattgcctgggttgcccctcgcttccgcaggtcgtggaaggtctggttgatgccggtgcgctccataaatcggttcaccttgcgttgcagcacggcggcgctgtattgcccgcccccggccgtaacgacgttcccgccggtattcggcgcgataatgtcctggaggaccgcagacaggccattgacgcgctccttggcccccttgcctctgatgtagatgcgccgggattcgatgtccacattggaccagtcgagagcggcgacctctgcaactcggagtcccccatatgcgccgagcgctactgcccgccgtatttccaggtggtctaccgtgagcgggccgatgatccgttctaggtcagatttggcgattgggcgcgggatcttattggggacggtcggcgcgtcgagccggcgggtagggtcgtcgtctcggtggtcgaatcgcatggcccagcggtagaaggatcgcaggcatgctagttcattctctcgggtggccggtgcggcgtcgtatcggctcgcccaccacgcctcgacctcctcgcgtgtcgcggctcctgggtctgctagttgtttcagggtggctcggtatcgggcgatggtgtgaggcgagcggttgcggtctcgctcggcccagtggatgaactgctcgacaaggtctgtttccatgcccctattttacacggaagtgcgtataaggatgcttataggtcacttttaggcgcatgactacagaaccattccagtgttagtgatcaggccccgggtcgagtgttcgtgcactctccggggctgcctttggtttagcacaaaaacacgaatagcccccaccctccgtaagtggagagcgggggtctttgtgaggactcgcggtgtgccatgtggccctacgagtcatagtgattacagtctactcgctaatgtccacgtgcttgccgtcgtagctcgtgccagccgtgaattcagcgttgccgatggaggtggcgagcgatagcacggtagcgagtccggcgattgacagcgcgttcagccatgacacgtcaccgagtgcggcactaacgccgatagcgtttacaccgaatgcggcagtgaccacggcgacgaaagtttggaagaaggtcttgatcgcacgttccgccgctcccatccagaatgccttagtgaagatcatcactcagccgcctttacttcaacggtcgtcgtgcccgatactgtgaagccgcttgcaatagcttcctcagtgccgagctttgcgccgatctttgcggcttcctgcaccttggcggcgtcgaatactacgttgcttgccttggcgagctgtcgtagctgttcatcggttgcggcctgatactcacgctggcgaacgtaaacagagttcacctggttagccgttgccgccttagctgcgtcggcgcgaatgtcgctcaagtcagccttagacgccttcgcgtcaatagccgtcttcaactcagcgagcttcttgaaaatgtcgtctacggttgccacgtcgatttcgtcctttgcggtggtggaagttggtgtaacggttgctttgatgtagtagccgcgcttgacccatgcgcggaagtcgtccatgtcaatgccgcgagggtcaggtttgcggccaagggggatggcggtctctttgtgtccttgcaccttggagacatccagcccgaattcgtcaataagtgctcggcagagcttcacgtaggagtcgagctgcttagctccccacggctcggttccatcgcccgtgttctctgcctcgatgccgattgagtaggagttgccctcttcaactgtgcgtgatgcgccagcgtggtaggtaagcccagcggcgataacgtagatggttccgtcgcgccccagtccgtagtgactcagtggacctgatagccccgtgcgtccgttgagcacggtgcccattgatgggaagttcccgtttgcgccacccgctgtgtggtggcatttgatggttttcgcgcccagcattggcccgtgtccgcgcttctcccagccgtccacctcgatcacggggtagccagttgtacgcgctaccctcgctagtcctgtgaaatatggcatgtctcactccaataaaaagcaccctctcaggtgcgtagtgtgtccggtgatggtggcgcgtttggcttctggcggtggacttcccagccagccgcgagctgctgataccagatcgcccagcgttcgagccggtcagcgaagttcttgcgctcggtgcgctcttcctctagctcagcttcgaggatgtcgatgcgcttgtcttgcttttcgagccgatcctcaacactcttgagtgaggttaggagaatctggttcgcacccgccgccagcgcaagatcgtgcgcgccttgtttgagtggcgtttcggctcgtgatgcccggtagctccaaaaccccgcgccaccaaagatcgtaaggatgccggcgacaatggagatgattagcgtctcactcatttcacccccagctttctgcgtgccaccagccatatgacgagtagcgagattgcgcgtagggatgaggcgatgcccagtccagcaggtacgagccatgagaacacggagtttgggtagctaatggcgacggcgattgcgtagacgaagaagccgcctgctgagagtatccatccggttcgctcaatcccccacgccctgttgatagcttgcgagtcatgccagtgcaagccgatcacgctcgtcactccaccaaggccaatgaaccccgcgcagattgccacgagcggccacggcatatccgccattgctggggacggctggaaatggtcgatcgggatacttgctgacatgacgacgccgaatacgattgcgaggactgcgagggcgttctccattggatggacgaggatacgctcccaccacctcggcggcgtatagatcggatgataggtgcggatcatagctttttcctatgtgggattgtggcacgccacatgatggactcctctgggtaatttgtgctgcggcgagtagcatcagtcacatgatgactctcttgcgtcgggccgtgatgctatggaagctggaagtgcctcgtgacatgtgcttccagtgccgcgaactttcgaaggctcccggctctgacttctgctccggcaaatgcgctatggactaccagatggatattgcctactaggcgctaagcccttcagcccacgcttgtactgctccggccattagagcgaacccttcgccgttcgggtgaagcccgtcgttagttagttgagtgccgcccggtgctgcccaacggttcgatccaagcgaggactcgaccggtcccgcgaactcgatccaccctgccagtgggtggccttcctcgccagccctgattgcggtgctgtcgccaaccgcggcgtgcaacccgtccttgatcgggcacccgtcgcggatccacgagttatacgctccctgcacgccaggatgtagctccgtttgtccttccacggtagcccatgagtcagttgacgtagtgtatggattgatcgtggtctggtagagcttcacaccgacggggaaccgcgcttgaagcctgaaccacaaatcgacttcatatgtcttagaggtgttgaccccgaacgacgacgcgtttagcccgtgctcgacgatgacatgggtaacaccggggtctggtagcgccacagagtcaaagtaggccgtcgtgttctggctggcattagatccaccaactccccagaggacgtgtggcactccggctgcggtaagacctcgggcgaacgcaccatgctctgtgatgatgtcgtatgctcccgcagataccgagtcgccaaccacgccaaccgcaattccggtgccagtctctatcgcggcggaaggtgcaggaccctgcgcgatattctttgtaatcggccctgtcactccggtcaggtctacattcatagacacagcctcaccagtccggtgcgcgtcgtcgatgaccgtacaaggaactcggttcccctctgccacagatgcaaacgttcgcacccagtactctccgggagtaatgtcaatcggatcggtcaggactagcgcacccggctccacgacagccgaactggcgccgccaaaggtaaacggaatcagcgcgccagcgagcgtctcaaaggtcaccttgaccgtgtaggggctcggccccacactgagcccgccaagattattgaagacgagacggaacccttgccctgtgccatacaccacgtgcttacgtcgcgacgtaagagaggtcgtggaatcagccccggcacccccatatcggttattcatggggcgagtacggttcatcgcctgccgaaccgtctgcacatacacgggaggcgtccacggttccggctcaacgggcggctcggaatcaccaaacaccaaagcgccgctcgtccggtacacagtcaccagattcccctgagtgctgtaaatattcgccattacgcaacccccgccgcttgagcgtgagcaagaatccgagcatcggaaagcggagaattcgttactgcaaaccctgcaacctgcccaacgatcttgccgaacacgaacgacgtcatggtgggcaccgccgcggtcgccgtattaaccagcgtgccattgatatacaacttcgaaacgcccgcgctagtccacgtaaccgccacatgcttgcgctggtcgagcgtcgtggcaccagttgagatgatgttcttgaagtacgacgcgatctgacctgcggggtgaacgccgtcattctctggatacatgatcacaaaagcgtcagcgccgtattccagtatcttcatgccgccagtcggatacccagtcggcttcataatccactcccacgtcgcaccagtagacgaaggattatgcgcgatactggccgtcacagacgtctgcgtcaaagtcgcacacgtcgccgcgtcaccaatacccgtagcaccaaacgtgaatccagtcaccgcaactgtgccgcccgcagaaccaagattccgggcagtggaggaccccacagcatcatccagcggcaagtaatgcaacggactatccgcgagaacagcgttgtcgtaatcacccacaggaaccgtaactggcatggcgtccgtagtcttagcaatcgacgtacccaccgtctcattgccagcaccgtccttgaccttatgctggaacgtatacgacgtagacgccgtaagccccgtcgcagaatatgaactgccagactgccacgcagaccaagcacccgaattcaccttgaacgcataccccgccaccacacgatcatcagacgcaccagcgacagacaacgccgccgaattatgcgtcaccgtccccgacaaggtacccgcaacaggggccgtcgtatccggcgtcgaaggctcaagcgtcagcgcaatcttccccgggttcgccgcctcgtaagcgtcagcctcagcaagggtttcgaagatggggatgcctgcgccggtgacgccaactagtgcctcagtcagcttctcttccgtgaccagtcgtacatctggtgtctgcatactaggctcctagctcgaaaaggctgataaagtttttgtgttccattgcgctaaacctgttcaaagtagggcgtcccgtctgtgtcaacgaggatgcgagcgccagttgacccaatgctgatataaggggtgccgtctgtatcaatggcgagatttgtgaccgtcagccgttcgagctcatccaccgcgctgccgacttggaggatcatctcgtcacaccagcgcgagtactccacgccaccgacgatcatcttcacgcggcgagtggtatctaatgtctgaaatggggtcactagaccgtttgcgccagaaacaaggagtgttgccacctcgtcgcgatatgcgtcaacttctgcgccagtctcgaagtcaagcagtttcacaacctgattcgcgagtggccgcccggtagtggagtctgccaccactagttctgcgtaatggttatatgccacaactccccttatttagattcgtactaatcgccagccgagcgtgacaataaggtcacttggcggcgttgctgtgtcgtaggtaaagactcgaagcgtgacggttgactctgtttgcgaggcaaccgaaacccacacccatccagatgtttggatcgtgtaaacctggaagccgtaaccctctggtggcgcgtagggcgtcgagacgttcgccgttgccacgtacgccggtgagtaggtagacgcccatgtgagcgctggccccgcaatagttccggaggtctcacgcggcgtaatgaggccgacaatgaacaagcggcggttgcgcatctgcacccacacccgatcacctgccgcgagtggcgtgtcattgagtgcgataggttccgcgtccgatggatcgtcgtccgtaatgagatgcaccttgagcggcgacacctgcgtgatggttgcttcaatccatgaatccgaagcgctcgacgttgcgggcataatgtcagctagtggattacgcaccgacaacctcccgaagagtcgtgctgcacagtgcgccaagctccgaagagtaggacaccttttgcaccacggcgcgaattgaaatatcactagtcgagttggcgaacgtgaccacatcgccgccaactagtgggatcggcgcgtgctcaatatcgaagccggaagtgatctgttgcagctcaccaagtcgccgtttcgcgtaggccattgcgacagtctcagatgtcagctctacgctctcgacctccgccgtgagaatgcgccccgttgtcaccgtggagaacggcgagttagggtcattgtcttgcgcgaatccgcgaatggccggagcgtcactgtcgccctccgagacgaccacaacgcggttaggcactgcgtaatcgtcatagtcttcggtgaactctggcgcgtagatacccttttcgtcgtcaatgaacccgaactcaaccgctcgatcctgtggccgctgatatggctgtgatcgaaaatagccgttgccgtccgcgtagatcgaaaagtaattcacggcagcgagcagatcattcacgatacgcagaaccgttgttcctggttcccatgtaatcgccgtgcgcaaaacttcatcggagtcgtcaatcacgtattggggtaagccccagaatgtgagcaggtacttcactcgaccaatggcgttgatgccctttgccgccgtataggtgttactcatcttgatgtcccgcaacagcatcatgcggtcgtacatctgaaattcccacggcgaacccgtagcgccatgcttgcgttgcggcgacattgggacgtagacacccagcggccatgacgcgacagaatccccagccttgactgtgtataccgggcgaatcaagttgcccttacgccagtcaattgagccaaggtaggagaatgagccggagccgcgcacatccgaattgaagttcagatcgaccgaacacgcgtcaaccccatccacttcctcgatgaggtttaggtttcgatcgagtcgctgatacgtccagaattcttcgtggcggtcagtaagcgcgtcataagtccgacggtcaataagatccgaaaatacgacgctactcaatgaaatccacctttcggaagctcagtgagacagtgcccttgatgcgctcaaattccagtgcagtcccagagttgggctgcacaaactcgcgaacattcccgcccgcgccttgcttcatgtaaggagcgcgcacacagaaggttcccgcgagatccataagcgcttcaacctcggacggcgtagaagagttatcccctagtcgccctgaaacgctaactgtcttgtcacgcgtctcgccggtagtagctactggatacgagcgccctgcaaagttgttgaatacccgctcgcgtgtcgcgttgaccgaagccgtggcgaaatctgcaaacttgatcacttgcgagaatccggggccggcgttgacgtagacgaaaccccgatgcttggacgtgtcgaggataacttctgccgatgtggccgtggatggaagctctgaggtcgtgatcacgcggtaccgattgagagcattcacggccgggagctggtcaacaacagactcggaaagacctggagtaaccgagattgagttagtgaccgcaacccaatcacccgcgccagtgtgccgctctaggtgccatgtaaccgcgtccacttcgccagacccggggccgggaatggtgacctcgataaccgccgcgcctgtggaagtgtcatagatagccgtagccgtggcagatggtggcggcgcataggagaccgtgaacacctgcgaagtatctgcggaccacaatcccgccccgtcgcgaacggcgactttgagcgtataagttccaccgttatcgagtcgcgttgcaagaactcgcgatgatgccgaacctgatccggtatatgtttcgagagtctgcctagactgaatgagcgtgacgcgataagctgactgattcgttgactctggatccgcataagcccattgagcggtcagcttggatcctagaaccgtttcagggctaaggatcgtcgcgataggagttgcggacagtggcacaacagcaaccgcgctccactcggagccggtagcatgatcgccccacgtttgaacctgccactcaaagctagtgccgttcgcgtaggttccagccgcgagcgcgcgggactgtgtagggcttgccgtcttggcgaccgtagtccacgtcgaagcacccacggcgcggtgacgtagcgagtagtacgtttgcgcggtggtgtccacgggattgtgacgccatgagagcgtgatcgcctttgcgccatccgcagcgttgccacttggtgcgagattcgttggcgcgttcggcggtgccataagttgcaccgtggccgattgcaccgaatagacggaatagagtcgcccaaaggttgcatcgtcaacgaaagcgcgcacctggtaagcgtgcgtcttagctggatcgggagccgttgcgacagtagatgccgcgtttgccgccgtgagaatcgttggcgttgtcgcaacaccgttcgcccagtcctcgacctcgtagcgcgcttcgacatgtgcgcgtcgagtccacgaaacggcaatatcgccgccagacttcgcggccttgacatcggttggcgagattggcgcggtgtaaaaggtgggcgagtaagcccacgccgaagaaccgctgtcattgttggcgcggacacggtaacggtatttcttattcgagaccgtagaagtgtccacgaatgacgacgatgaacccgcgagcgtggagatcgtgacgtatgagccggagcctagaacgtctgcgcgctggatcgtttgcgtgtcatagatcttcgttggatccgtggcattcgtgcgcgtccacgagaccgtgtgccgcgtcgaatccgtgcgagctacagttacagcggttggcgcatccggtgcgtagggtggccgcttggctgtcgtcgtagaacctgaagccgtagccgtgacggacccgccgacagcctcaatgccactcagtgagccggagaagctagacgtaaccgcgccgccatacagtggcgagaaagtacggttgatcgtcttgatgagctgctgattagacgtagaccactgtgaacccgacgacgtggaaactgagacgctaccggagaatgagaaatcgccgcttaccgtgagcgagttagtcgaatccgagataggacccatagtccacacatacagcttcagtgtgaccgtaaccgaagatgtgccggttccaacggtggccgggctttgagtaaactcgtagcccagccgaataccgttagaaccgccagtcttagatgcgccccaagtgatagccaagatagctccttatcgtgcgcggacaaccctgcgagcgtcacgcgctagttcgtctagttggcttccagcaacttcgcgcacgtatcccgaaaggcgctggccgttttcgagtaccagttccatccgtgacggtgtgcgagatgccgcgagagacgcattgattgcgtcgaagctctgcgagttgctgacattgctcagagcgcctagaagtgccgtgagacctgccgaatcgcgagccgtgaacacattgccaggggagctgaaattcaccagctcagggccttgctcgcccacgagagaccacccggaagcgcgcccgccattagcgaacgccttgacgggaccgccaccaccgcgctggaggtatccagcccagttgaacggctgcccgttcttccacatttcaacgtgagcgtgaggaccggtggacttacctgtattgccggtaagcgccgtaatctggccgcccttgacgcgagagcctgcacccgcgagaacctttgaaaggtggcccacgtaggtagagatgccgttcgcgtgatcaatgagctgaccaatacctgtacgccctgcaacgatgttccagcccgccttgcgaacgatgccgttgtacattgcgcggaatggcgtaccgactgggcttgcgaagtcgatgcccgcgtgcgggtaacgaccacgagacgtaccaaagccggacgtgatgacaccgcgaggacggtagaagttgccaagcggtccgtcgtagccgaagtacccaccagcgccgccgccgaaatcgccggtcatctgatccttgccgcgaatccatgaaatggccgcgtcgattgcacccgtcgaagcacggcgagcaatatccgggaaagcattctctccaggtaggagcgtcttgattgcgtccttgacgggattcagtagcattgacgccacatctgccagtccgccacgcacccagtcgagaccgttgccgatattgcgcactgtgtcgcgcccgaagtttccaagctcttccagccagccgccgattggcagtggggaattcttggagcgtccgccgttgagcgtatcgagtgcatccattggcgcttgctgttgtgatgccaacatgcgcttggtctcgttcgccgtgtagacgtagccggggcctgtgtggataagctcggggccttcttcgcccacgagcttccagccgttgcgcatttgtccaccagtggcgtatgcggggacgtcaatcaatccaagtcgtggcagtgcgtcgccgccgacgatctcgcgaaccttgttcagggcaacgcggagaccatcgttatagacggtgccgataacaaagttgattggagccgctgcgatgcgctggatgccattccagatcttcttgatcgcatcaacgccctttttgaacgctggctcaagaacgtcgcggaagaagttaccgaactcgcgcaatgctggctggatgacgtcttcccacgcatccgtgatgaccttagaaaccttgtcccaaaccggcttgatgatgttcttatagagccatgtaaaggctggtgagaggacgtttttcacaacccatacaatggttcggaagatcgtatccagaatgccccaagcgatagagacagctgcgacgatagcctgccaaactggacgaataatgttctcgtaaagccatttgaagattggcgctaggacgttgttgatgaagtcgcgaatcgccctaaacgctgggagaattacactctcccaggcccatttcacggctgccgagatgccgttccaagctgggacgatcacgttttgccagaaccagacaatggccggaatgagaacgttcatcacgaaatcgacaatggccttgaatgccggttgaatgacattctcccaagcccacttgatgaccttttgaatgccagcccacgcttcatccatgaacttccgagcgtcctcattggtctggtagagatacaccagagcgccaactaggagcgcgataagaccaatcacaatgaagatcggattcgccagcattgccgcgttgagtttcaggaatgcgacgcgagcagccgccaagaatccaataattcccgtaaccgtcttgtaaataagaagaccagtgaagaatgcagccgcagcgcccgcgatagaccacaggagcggcgtattcttaccgagccaatcccagagcgctgcaaagaatggcacgagctgttcgtcaaagaatttaccaatagcctcgccagcctttttagcccactcttctaccggctccagaagcttgagcagccccttgaagaactccgtgaacttcgggtaaaccttgctcaagaggtttgcgccaacgcggccgatagacgcgagcgtgttattgaaagcaccctgcaacgtgtcgccagacttgagagcagcgccgcccatgccctgctccatggctttttggaaatcctcgaagccgatctttccctctgatgccattttctggactgactcaggggtttcacctagggactttccaaggagctggagaatggggatgccgcgctcgccaagctgcgcgaggacttcaccctgaatcttgccggtacctgcaaccttgttgaagattgcgcccatttcattcatgggaacgccggcaatagtggaagcatcagcaacaagcttgagcgtgcgctctagatccttgccaggtttcacgccagacgccacagccgaagccgcaaccgtggccgcttcatccatgccaaacgcggtaccctttacggatttcagcgcgtcattcatgatggtctcaacggtcttcgtatcgtgaccgaggccggctagtttagcgcgtgcattctctaggctctggagtcgtccgaagcccttagtgagtgccaacgcgaaaccgccagccgcagccgcagcaccgccaagcaatgcacccttagcggcaccagaaaacccggagccgaagctcttgccagattcttgaccacccttagaggtgccgtcaacaaccttgccgacttccttttgaaagtccttgaaagacggtcgaatcagtacctcagcaacgccgatagtaggcatgcgacccccttaaaggatttagttttttggcggctttagagtgacgtcagagcgcttgaagccaaacatctcagcgagtcccgcgacgtgctcaatctcgcgatcagcgcgtgcttcggcgagtggatcgaacggcgctgggaatggcttaggtttcggaggcttgccaccagctgcacgcatggcgatcatgttgccctcttggattgagtgcagaagctcgcgaagtagctgctcagtgagtccaaactctgtgatgcttggatgccactctggagtgttatcctcttcgtcgtcggtgcgagattcttcaatctctagacgcgcctgaataaactcaggatccttggacatcgcctcgaagtaacgcgaggtgcgcgggagctgatcaatgagatccagcaatgccacgtacctgcggcgctgatagaacaatgagagatccacgccgtactcatgtgcgagatcggcgcggatctctggcctaaaccgttctaagagcgcatcgaggcgttctagtttcccgaggggccgaagaagtcctcaaagtgagtcttgacagcggcgagaatcttgccaatctgaccaagcgtgaatttctgcttgcgaatcaatcgaagctcttcttcgggaagccattcaccaagaatctcccacaactcatgcgggcgaatcgtcgcagctcggagcagtcgaacacctgactcagcttcgagttcttccggagaaacaaaggtgatctctgacccatcggcgagcacgagcacatatggctcaacgtcctcgccgtctttgataatggatccgatggtgtgacgtggtgctggcttatctgaaatcttgcgggcggctgccatgactggctcctttacttagatgggtttactggcttggcttcaacgattggcgcgggcttctcttcaaagaatccaagtgccttgagtcgctgaatttctgcgcgggttggcttgcttacggtgaccttttgggcaccattggaaaaagtaggcatgactacctttcgtggggcggcaatgaaaagcggcgcgcacgagccgcccaaggacgtgcgcgccacaactaggggttaggcgccctgggtgtatcccagaatgtccttagcgagaatcgcgccggagccgccgaagtaatggcgaaccgggacgccctcgacgtcatcattgaagatgtcgaacgtcacttggcgctggtgagcaccttcatgcgcccacgtctcttcgccaagggatgagatctttgcggcgaagaatccgcgcccctcgatccagtgattggacagtgggccgtcagcggatactacgatcaggcggacttcatcgaagttcgggaggtctggctcatcgaagacaacttcaccagtcgtagcagactgcgtttcggtgatcttcgtaccgcgcacgagttcctgaatggcctttttgccggattcaagaagcgtcatggaaacggtgcgcggtacgcgggtaacatccgagcggaccgggctgtaatagccaagtgcgtcaatgtcttccttttcgatctcgccggagaacgtgtaaccgtcgcgggtaaccatgccaatgggaatgaagcccagcgtggacaggtctgcgatttcggttgcagaagtaaggagggtagccggaagctcgacagtcttaggtgcaaagcacgcgagacctaccgtagttttccgaacgagtgcgcgggagtcgaagtccttgcgctcagtttctactgtggacatagcaaataacccctttcgagggtgtcaatgtggagaaaccccgagtggggtgaaaggtgggcgactagtcgagcgggcgaacgatagtctcaatgaccgccgttgctagatttagagtgtcttgcgggtaaggcgattcagtaggcgggacgatgcactgaatggaatcgaagaacacgtcaggcccctcgatgccgtcaccacacaatgaggtgatgatgctttcgaggatcttctttgcaagctcgcccggcgcgtaaacctcaatcagcacacggtcggcacggtcgatatagccgatgtttccaccagccgaatcgaggaataacgcgagcggaatatgtgagattccgttagcgtcaacttccatatgctgagctgcgtagatgactgaaccagcgtgttcctcgccgtccaccatgagcacgagagccttgcggatgtcaggccaaatgagagcgtcgtacattacttactcaccttcataacctgaataaggcgaagaagaacctgatcgcgagcgtcgcgccaatgctgcgtcgtcacctgcacggacgcaccagaacgctcttcattgttgcgaccaaagcgaaccgacgtgggcaccgctgaatactccgcttcacccatcgagttagccgatcccgcaacaccctcagcaacctctagagtcgccttgccgatctcgctagacgcgccaagaacgcgcaagccctgattcagcgagcggtaactcttgacgccgggaatcttctggagcttcatttctttagccccacttcccagccaaacggccattcaccaggacgccccacgattgaccaaataccagccaaacgcgagccttctgggatgcgtatccggtcagtgttcaagaacgataaaccgggcgttagatcgcaatacagcacggcggttgcgtctgcgagatccgaaaagtcgtcctgctcagtcgagacgcgaggcgcgattagaccatgcggaacttcaatctcggattcgggaagcggattagtgaacttgtcgcgaccgccgccgcgaagaatcgtaaacgaggtgcgccatgaggcggggaaacgggtgactatgcggttattcataaattggaacccccgcaatgtcagcgccgcacgagcagtagagcgcgccaaaattcagattgcaccaaggacgatgaataaccgcatagaatgacgcgatctgaaccccgaacgccgtttgacgcccctcacccagcgcgcggcgctcttgcttggttaggtagaagtcgccgtgtggattggtcggcttggcggtcatctggaatgggccggctccaaactggaccgactcattgccagccatgtcgccagatgccattgcacgttttacgacagcacaaacgatgcgccgaagtgtgctcgccgatgcggccagcgcactgggaacggtgtccacaatgaactgactagcatcagcgagcaacacgttggcgtgatcctcagcccctgcgggaaagtctggccagcgctcaataagctcagcaagtgtcgcaaactgcgttacgtcggccatgacttaccccttatttctcagaagctgcggatgccttttcgacaacctttacgaacgtctgatccagagtctttgcagtctcttcgtcaacgttcacaatggagccggttaccttatttttgaagcgaggcaagttatgcaaccttgtcttcgataacagcgaagcgatcagcgaatacgtaccagccgtaaacaacttcgaggcgaagtgcgatctggttcctgcgcttgaggtcaccctgaccgtctggatcgccgaagcggataagctcaacaggaagctcgcgctgaataccccagcggatgccgttctggaagtcgccaaggattgcgcgaaccttcgtatcaaccgcctccggggtgccggatacggtgttgccctgagctgctgggatggatgcgaacgaggtgatgtccgttccgagtccaaggttcgggtagcgctgagacccagaaggggatccgtctgcattctcggtctggaggtcggcgagcgcccaagcaaacttagggtcaatcgcgatgccatttacgccccaggatggggccgaattgatgagcaggccagctgcggtgcggatatccgcatcagcgtcagccgtggcgatttcaacacgcttcgtggttgcgccaacatagttatcccaggcggtgataacggatccggtaagcggattgatgcggtggtagacgccaaggtccaggccgcgagaaagtgcttcctgaccggcgcttgcaagctcactaaagacgttcagctggtaatcctcggatgcccactgaacttcttcgctgaagcgcatcgtaacctgcgccttgtgaggcttagccgtaacggggctgaagccgccactcgtgctcgccttgtcggcaccctcttcaacaaactccgcctttgggaagtcgttgaatacgatgtaatcggtctcgccgaacttcataggctcgcggcctgaaagctttgcgacggtagaaagtgaacgggtttccttgatcatgccgtccgcgatattgcgcgggagcagaaccttggcttcagcggtgctgaaaatagccatgatttacctttcggtttatgcgccaaacagggagcggacggccttgatttcgtcgctcgcctcaattggcgctggaactttttcttgcccttgaataactgggccggactgtggaacaaggaatgacttcaactgctcagcatgggcaactagttcgtctcgcgtgccacctcggaggacgtctggcgcaatgccgtattccttggagatttcagcgagccaaccattgcgctcagactgcgcttcgaactcagcaaccttgttttcgagtgcagacttttcagagagaaccgactcgaactgctcagccttagccttgagttcgtcgtatccctcatactttttgcgctcgcgtgcaacgcgctcgccaatgatccggtcaagctcttcctgtgaagaaggagccttgaattcttgagcactggttaccgcgtccgcctgaacggcgttagtggtttgttcgtccaccgtgctggtgttgtttactgcatcgggcatgccgaatcacctctccgtttagccacgtctggcatcattgaccgcacttgaacgggtgcgtgccgcttcacggtgggccgtgaaaaccttgttagcgcattcctaattcggagcgcattgaagcgaggatctgttgcttcttttccttgtcggagcgagtttttccgtcagcgtcaacccatcgccccttagtggtgcgattaccgtcagcgtcacgctctccaggaatccactcttgaccctcagaaaccttcttcgctgattcgctgtattgctcgtagtagcgatctgcgtcctgttcgagcttgaaagagttgccctcatgcaccgcaactacggtgcatcggcaatagtcgtgaaagctgtctccgagtcggcgggatccgcgtggacggatgccctttgcttgaccgccacggcgtcgaacctttggaatctcagttccacgccctacgaccgtttttgcggactcgtaggagccatacgtagcgccacgagacgcgagcattgcgcagaacgcgcagcagccggcactcggaacgcgctggtatccaaccggggttgtatcaatctcggcgttgccaataattgtgtcgaatgacgcctcagtgagaacccatgtcagcccgcccgcaatacgcccaaacgcatcagcgtccacgacctcatcaagtgcaaccgaactcgtgccataccctgccaaggagtgccaccgcgagcgagacacggactcaagcggttccgccacgaatgatccggagacctcttgaagctcgcgcaactcgtcgtaccacttgacgctcgcggtgatcataagatcgccaagtgggccgaagatctccggagcaatatcaatcaattgctcgcgagtaatcccagccgcaaccaattgcgataatcgcgcataggcttcgcggcgaatctcttcttgaaccaggcgaaagccttgagtgacctcaatagggaaaaccgtcacgagatcccctaactagtcaccgatccggtgccggttgaaccctctgcggttgcgaccattgactgcgcatcacttccgcgattcgcgccaatgttctggactaactgcgtaattgcagagcggttcacgtcggactgaatgcgcttcacctgatcgtcgtcaaagaccgtttcaagcaatacctgggactgtgcaagcgccggattcgcgctcgccagcttcacgtaagaatcggcattcgcggaggttgaccggaactcagggtccgcaaacttcgcggagagttgccacatgtcagaaggtggttcgcttagcccatcgcgcaccatgacggcgagtgaggcaatatcgcgaacggcggttccaagaacgtacttgttctggaatgtcgcatccacgagtaggtcatgcttattcgcccggatagcctcagcggatgacggattgtcatggatgattccaaggcttgccggtggtattccagtttcgccagagaatgccattgctaccgtgcgcaacatgtccgagtgtggagccattgttgcttgctggagttgcttgatattcggcgcgtgaccgtccgcgtctcgcgtgagagcgataagacgatccattgcgagctggaagcgcttctgagatgacgggtcaccgtcaaacgcctcagcgtcaatgccctcaatggcaacctgtggcgatgagtagaactcagcattgccttccatgcggacataggctcgaacggccatatccgtaagcgccataactggattagtaatacgcgaacgcccaaacggcttccctagctgcggatcataggtgatcgcgaccgctagggtgcgcccaataatgtttttcgtgcgctccgtgatccacgttcccttgccacctaagcggcaatgaagaatcgcgtcaggaagataaacaataaatgcggacggtctaccgtttttagtgtcggtaatcgtgagcgccgcagagattgcgcggcgtcgagcgtcccagagtgccgagctatgctctgcggaatgcgtctgaatctgaacatcaggctcaccaggagcacccttggcgaccgtcgcgaaagatacgccgtgcttatatgcagaagtgacaccctgtgagaattcgagaccgaaacggttggcttcaaaaacctcgccaagctcaaacggatcctcagagccggggagtcgtaagccctcaaactgactcattgacgccagcttgcgaactgccatagtcgcccagccaaggtagaacttcgcgttctttagctgcggcgggagcatgagtccaagatccttgaacgcttgttcgccgtcgtaatagaggctgcggcgctggttcttctctaggcggccattccatgccctgagaagccccgagattgtgtctcgctcagcatcggtaacgccggaaatggagatcttcgagatgtccgaggtagtccaagtgctcacaagaacaccgcctttcttctcggatttcgagttgtagtctttgcgccccagaatgcgaacgtcacggcgtcgaataggacgaccgtgccgccgtcgggggaagcccagccgaagccgccgttgttgccgatttttctctttacggctggttttatttgatcgtcgagcgcttgttggctgatatgagtaatgccgttatccgcgattgcagattcgaacattccgtgagctgcaatagcttcatcggcggatggggtcttgattaccgattccggaattccctcagtccttagagcgtttaccaaatacccaactccagactttccttcaatgacaatctgggcggtgctttctttgcgctcaacaagccaatcaatgagccatgacgtgccgttgctcgacggggcctgcttgatagcctccacatgcacggggccattggcggggcgagttgcggcggcgagaccgattgcagatccatcaattgagaacttcactgcaaaaactcggatgccgtcacgcggaacgtcggtagatgagatggaacgagccgcccacttatcgaagttgacggcctttcgggtgagcgaagtttcatcccagattccgagagcttcgcgcttgaagttctcatcggatccgagcagctttctcattcgaagaattgccgcttcggttgttcggtgaggataagaagggtttgcgattgccagctgcgaacgatcattgatgttggcgtttttatcagcggaaagctcgatatagagacggtcctcgtcgccgcttagtgcgtctgagcgagcggacgtaaagacctcgccattatcgcgtgggcgtggcggcgtccccatcatgaaaactaggccattgggtgccgcgttcgtcgccggaaccatatccgtcatggcgtcctcagagaggatctgagcctcatctagaacaaggatgtcaacctcgtcgaagccgcgaccaaagccggattcgcgagcaccgaagaggattcgcgagccgttgacgaatgttatttcctgctcgccgttagtggcgcggacattctcaatccaaggcgcaactttcggcttcttggcagtggactgcatcttcttgaatgtctcattgtgcgttcgcgttctatgcgcagtccagatcaccgtgagattcgggaagagtgagcacagggagaacacgataagcgaaatgaggtaggtcttaccgacctggcgagggattgagaggatgacgccgccaattccagcggcgtagagtccagagtcacgcttcgctaaggctaggcgaccaatgccgtcctgccatgcatcagagggcatacccatcttttcggcgcgctctttgacagccggccagcccgtggacactattccagtggggcggcagatatggcgagctacctcagatagcttcttctgaccactccgagtcttcggttgcgccaatagattcggcctcctcggacttttgacgttttagcgtctctatttcccgagagatctcaatttgacgacgcattagagcggcgagggctgttgggtttgtgttcgggtcatcaatacgcctcgacgcaacgcggcgcatttgctccaactcatccagcacggtgccattctcggcagcttccaacacggaagtaataggcttcggagccgctacctgctcgccgtccttgactgctcggagcgatgctcgctttgggtttgccatactcgctccaatcggcgctaaaaaaaacggacggggagggatcgctgtgacttgaagtcgcggc

SEQ ID NO: 332 - DNA, 1937 bp, Zea mays
ctgaggctccctagtcccctccccttttatatgcccaagaaggggcaacatttacgagataggtaccaagtcggttacctaatacgagttgttatcgagtaggacccgagtcatatgcaagttgtactctattcttttatatgtatgcctttcttttctattaggatatcggcatgtcgccatatccatttgattcttgaccatatttgtgctgataaaatctttgtcatgtttatccttctagaattctcctgatgataggtatcctcctaatctggatcacataggcattgggctctcgaccaagcccatgagctcatctttacttgtactccatctcaaagctcgacatggtacccatgatgtggcagtagccttgagtcttatttggtcatgttatcgaattgggcaagtaaagctctaatattgaatcttctatagcaacttgttttttattttataagtcgatctttctcgagtcctgtggttgagtccctgactcaaccatcgagtcaatgcactgttcaggactcgtcgcttttcctaaacacatgctcagactatattttgtgcgtcacaacttccacatcccattataaaagaatttccccatgacacttggtcttgtttgagctgtccattcacactcccacttttccatagaacatcacatttgtcacgatatctctcgaagcactttctaacctcatcttctcctctgacgccagattcccaaactacaatcatggttgcctctcattcgcatgaatttgaggtcgccataattaagtccaaggcccttaaatctttggtcatgattgaattacttcaagagaaaatataatccagtggaaaattacaggtaaagaaacctatcccatgactaatgctgacgagatcaccatcttttcttccttcttgatgcaaggatttagtctccctcttctcaattcttctgggatttgctccattattatcaaatcgagcttgttcatctcaaccctattctattctgcacatcaccatcttcgcgcacctttgtgaggcatatttggaaattccttctgtctttcccccttttagtatcttttctttcgctggccttgtcccagcaaagaacatctagctatagttgggattaagcttcgtgctaacaactaatacctcaactgtcctttgaaacctcccataaatactagcacaaacttttgttttatgttgaaaatcacgcccccaaaccacccgagttccttggaaaacaccctattccttgacttgagtagatgagtgacccactatccaagcacatcgatgccatctctgctacgatgagcaaaccaggagttgagagccctcgtcctctcgatggtgcatgtggtagggagctggacctagcgatgagcccccctccatgagaaagcaaactttgcatgtgaatatgatagagagactaatccctatcaatcaagagttcaaaccatcattatgccaaaggcggaggactagcttcaccagggattctcacccatcgaagactgaccaaaaggttgattgacaaaggcatattctatacttaagccatgacccaaggtactttaaggactatgccacttatcatttttttctgatcttgtttaactctgtcataatcattcctcacacttttaaatgctaaaacattatttgcttttacataaatttacttgggcaccaatagatgatgaggaacctgactcgagccacttacccaagtagcttgctgagcgagcccccatgagtcctcatgccgctaagaagtcgagtactcctcgtccatagaagaacgaggaaatagtctgagtcaatgactcagacaatgatgataatgacgattctcttcaaccctggctccaagtccatgatgctccaagaatcctatatttggcatttagatcagg

SEQ ID NO: 333 - DNA, 550 bp, Zea mays
agaccgagacccaaaggtgctcctctactccaccaaaaaaatttcaaagaaattgcatgactaagattgtgaagcttcccacaaacggctgatgcaagactatttcaacgacccatgtgtctatcccctactctactttcgtcaaaggcaccacatgcgaaggagtctttttttcttcaaattttaaagaggttgggtaagcattccccctattttactatttgggtcatgtcactcaaccgcaatggtttgtcccctcacaaaaaatgcactgcttccctccacatgcttgcctatggtagcattgctgactacattgatgagtatatcaaaatagggaaaagctctcccttaaactaccttgaatatttctataagggtgtcatttcatgttttggtgaggagcatagttgttgtcatactactgatgatcttaggcgtattttagttaaaggagaagagagctaatttcctagtatgatagagagtatatattacttgcaagaaattggaggaactgtcccattgaatgaaaaagggtagtttacta

SEQ ID NO: 334 - DNA, 5419 bp, Zea mays
gattgactagacaacttgttaacactgatcctgcctataccaaaatcactcacaagaggggaaaaaacagccacgcatgcttccagttcagactcactccagcatgacatgtttgatccttggacttcctttttagacagactaacattgacttcagttttgatgtaagcacaaatgaacatagagcaaaactacagaaatggcagactgaaaaacaacaagaaaatagaagcttcatttcagttggaatttcccagaatgggagcttctacgattgtcaagtagaataaatatcaccctggatcataagccaagagcattattttgtaagagactaaatttagataacctgtcattgaattgaaaagagtgttgcatgaaaaaagtaacatcaggttacaattacatgcaataaacagcatgaatgtgttatgtggggcaagcaatacaagcggagagggaagatgccaactggcctggcagccaggaaagtggctagccacgggtttgaccgtgattgccgacctggagccgaacctagtctattggttaaggaaataagcaattaggatatttatttgattgtgacaatttaggcttcagttagggccagaggcctatgtaagccatttggcaacctggaatcaagattaagcaatgaatcaatttattgccttcatcttcaaaatagggagccaagaggtaaaacctcgcttggattctgccggcgagtatagcctggaagccaaggaactccgcctacacctttgctacctccttaacgacaccgtaacagaatgtaatctagcaaactacctgtaacaaatcatcttcgtattgcaattttacgcagttccatgcgtgcttgagagaacatatatacagtaaaaggcttgtgaacaccaatcaaaataaatatgtgcttaccaaacagaacagctgctatcttaagctgcttatcaggatacttggggaagaatttatattcttcaaaaagatttgagatcatacagtcgaaaattgatacctccctgtcaacaatagcattcaaataatacaattatgaactgggcacagaacagtgtaagcaaaattctactgaagcacacagatgacagatctacataagttattgcaaaatagaacagagtactaatcaggcagcaactttgaaggcaaaggaactaacagtaagcattgaaacttctagattatcctaagcttatgtcaaaaaaatgtgatcctaccaaaatactgccccaatttggaacaaataatgtctataaagcatacgcataccttaaatagaatatacagcataatatcaacaaacaaaaaagcaagtttcaaagaaatgatcatggctgtcaattagcactcgggttaattaaactgttgagcatatatcttcttcaatatttggtaagctgatccaaacttatttccatcaacaagtttttgcagcatgttgtgaatgattgtccaaaccacaggatgtcagaaaagcaacaaaaatcagtccaaattaattccagttatagcttaaatttgcacctcttattcgtagattctttgaagcgcccgagcatttgtatcatggaatcaacgcttatttgtccagagaacatgtgttgaaaatatgcattagcctctacttcaatgtcatctgaccctccctctgaattagtaagttctctcacaacagagctaggtttcctcgattcatacagagcacacaatttctttatttcatccagtattacatctgacaagagctgccccgagtgagattgaagaacctgaaaatgtgcatgacatgaatccatacttgtcccccccccaaaaaaaaatccaaaacagcaaaactgaaaaaaataataaccatgaccatacagacctttatgaagacacaacaagactcccaatataagtttttgacaatagattgaggttgtgacatgccctctaagacattatcagtgttgctcatagttgctttcaggaaatcaacacattcctgagtgtaggcgagttgagttaggaaagacaaaccttataatcaagcattgaaataaacgggtagtttgctaccagaattgaacaacatgatggatgtgggaagaggtcagctgaaatgtagcagcttacaagaatagattatgcatattacctcaacgaaaccttttccatataaagataacttttcagtcagccatttctcaagatgactatagtctttcctcaaggcagcagcagccaattttatagaaaatgcaaatggagtagaatcaaggacagaagacagaatctgtttaaagtagaaataaaagttgagtgaaacaaatttgtgagaaaatagtgttacagcattgaagtaatattgtagcatggtcccaataacaaacagatgaaaaaaaaagttactttcatgtggataagttttgatacgatacaatttcagaaaataaagtgcattcctcttatacaaaccttcaagtcatgacaaacatcaacagttcttagcaaacaatctggatcactatgagcatcaacaaaacctcgaagggtgaagtatgggtttgtatgccagagataattcataacattgtgctttgttggatccttcagtagagcaggaaatatgcaggacagtacttcatactgaaggagattatacacggtctgcaaagagacaaggggaatttatagcactgctaaaaacaaataaaaatagatgcgactcattatgtgggaccagaaatgcatacgtcgatgcagctaacaccaaaaagaaagagataaggggaacttaacactattaaagtcatgaaactagaggcaaacccattaggtgggaatagaaatacatacagtgacatggctaacaccaacaagtaagagttcagggcaatgtcccagtggatactcaagcattgatcgtacagatgtagcgtacccaacttcagctagttggcataaaacttctaaaaggtcaaggcaggaccaagcatgattgccttgactaggacctgccaaatcctgaaattcctacagtatatgacaactgttaggtgtgaattggatagaattttatcaagatgccagatgttgtcagaattaccaagtgcctggacgaatgagcaaatgtaaatttatcaggtgaagcagaaactgcatgcttcaagaacgatatctggccttctctgtttttccacaatgacccacaaacagcatgaagtggaaatggatcctgtataatccaattaatttattaagcagctagttgattttccaagaatagaaatgtttatatatacataccttgcaagcacgcgtgtatatagacatcaataggtaaaagcctgtttcatcaggtatattgaaaccctcgtgatcaagatattccattacacgcacccagtttgtacttggggcctgcgtgttaaagagagatagagcgtaagggtgcaagataaaaaaaagaacatccaataaaaaagcaagaagtcaatagcttacgagttcattgattgaatccacaagaacatctgcgttccatttagtcagctgagatgagtcgttcgtgtggctattaagaatagcagatacaaatgttgcatatctgttatgggcatctccaagaccactatgagtgccaacaacagccccaagcaacttagatatggcgacatcatcaagaggctcaacaatggaaagtatttccttacagcgagtgttgtcaacagtacatccataacccaactcagctacaatgtcagccatgcttatttctttcccgatttcagacagaagtgactcaaaatcatcatttgtgctacccaagtacatatccaaatgtctacatggcacaaaaaaagagggggagcatttgtgaataaataggaatgaagaagtacacatattcagaatttgattagtcagaaactgaataccttgaaagatttggttgtctatcaaaatctccattagtgacaggtgcaaaaaacggcctctctgtgacttttagtagagatacaacattatttaaagtgtccagatgcttcaacaggccatcatactgatgcagaaacacgacaatttcatgaatttgatcatttgatacagattggataggattcatgcacagctcttcaatttgagcaattgaaaaccattgccctggaacaagaggcaatgtcaatgatcatctgaaaataagagaagcggatatgatatcactagactcacagagaaatgtctacctttctgctttatctctgagttctcagaatctgagagcgcaagcccaacaccaattttctcggcaactgagagttccagcagatttgacagactttcaagaaaatcatccgtcaaggctattgttgtcagcacctcacaaaaactggttgtgaagcatgtcttgcgcaaacaatatctgaaaacatcagataaaagcctttgttgcaactgcaactggaggttcttgacctccccagcattcagcaacacttgattcagacatactcggagcaccaaaatgcatccatccaggccactgtcaactaactgaaaaggtggggaaaataattggaattagaaaacatcgagcagactcagtattcagtaattagaactaagatatgatcgaagccaaagaagaaactcattttatcaagcaagtaggtaaactgctctattttgcgaaactacagtaggtggttcaacgagaatttgaactaaaactgccaatgaaaagtcaccacgagctctgtgattgaggaaatgaaatagatcagctagtgaatggaatgagttttagctattcatacagagtttaagcgcggtcataagtccaaaaacccactaggtggttcaacgagaatttgaactaaaactgccaatgaaaaagtcaccacgagctctgtgattgaggaaatgaaatagatcagctagtgaagcgaatgagccttaactattcatacagagtttaagcgcggccataagtcccaaaaacccacttgtgttaacctaggtcgctagcgctgaacttgtggcctgcaactctaacaaatctaaactcagaatcgacaatcgtaccgttaaacgctaccatatcctaagctagggaggaattgaacgcgctcacaagaatgcaggcgacgcagcattggcgagaacgcactagaacccgcggatccagactgggaagctaagaatcgaagagagggaggggggcgtaacgctggcaggaagcgggagggtccagcagtacagatgggtacctggcagatctcgcgccgaatggagtcgaagttggagtccgtagcgcattcaaacaggaggcgcagctccgcagcgacatcggcactgacggggatcatctcgccggcggcgaggggcaggggcggggagcgct

SEQ ID NO: 335 - DNA, 586 bp, Zea mays
aaacataaaaagtgtattaggcatgagagtaatataatgagtgcaatttgggggaaggtttgagtgtttgaccctaaaccatcttgatttctcgttgctccaccactactttaagaaagggtaccttctccatattttctaaagttgtaacaacagagatatcagcaagaaaaatcatataaaaacaaaaatgagaaacaatgaaaaagataataacataaaccatagattgtctgatttgcttctcatatagtttccttagattagaaggttgaactatattatttgacgtcgtttagtagcttccataattgtctattcatcagacttgagcatgaagattttgagatttatgacatacatcatatctactactgaagaagacaagaagggtactctactgttcagcctctaatttgggcaacaattccttagtataaccactacaatattcaattgtgtcaacctttttatcaataagcataagtaaattagtcctattaatatgctttgtgcccttgtattactttcaaatttcaagtttacatatatgactttaacgcgacaatgcggacaattttctccc

SEQ ID NO: 336 - DNA, 511 bp, Zea mays
cggaatcacgtctctttttgccgcgcgtggcttgggccgcctctagccgactggccaccgccgcgaccagcgcctgcatggcagggagtctttgcaggccggcggcactggccccagcgtcgactccgtggcgcaacggtagcgcgtctgactccagatcagaaggttgcgtgttcaaatcacgtcggggtcagggccctcttttcgttttgcttgccctggccatcgcacgtatctgtgttaggtcgtcgattgcagaaggggtgagggagcgcgtggagcgaccgccacggccaccagcagcggtctgcccgccgccgcctcggtagcgcagtaggcagcgcgtcagtctcataatctgaaggccgtgagttcgatcctcacccggggcacaaccttttttccagaaggtcccccccgatgctgaccagccccgcgtgctgctgcggcgggtccggcgtcactcacagcccctatggctcagtggttagagcaccggtcttgtaaaccg

SEQ ID NO: 337 - DNA, 3730 bp, Zea mays
gcatcagcagctgcacaacttttgcttttctaggcacttggtcttccatggcaggtgtaaccaatattctcggataaaggagtggcgtacaactaagacactgctttggcagtccttcattatgcatcaatcttttctttagaggggttattattattatgcattctccgttgcggatggttttttttttgggagttatctgttcagaagtaagcaatcagataatagcgtgacagatgaccacaaacacatctggcagcccaccgatgatactagggcttgcacgtactgtacatttttagggttttgtcctatttgtggcacgtctagcctaccctcgaacatacagaaaactttatgttctgtaccttggtctagtccctgccatccagtgtaccctctactccttcccagcctttagctttcttgtttgctaccttgagacttgagtcgtgagagatacgccaagcgaaaggacgagaccttgccggtctcaacagtgttgcgctcgtctgtgttgctgcccctgcccctaccgttggtcaaaaaggtaatccgtcgtcgtcgtctagtcgattcgcatccgcgttgctcgaatgccgcttaagtttccggaagatctcgtcgagtgattccgtagcggattcgttcgtcccggccctaggagacaggcccaataggaggaacttcctggagccgcccatggtcgctctgaggttctggaaacccgtcttcattgaggcccaccttgaggccgtctcagctggtgaatctgccgccgcactcacacaaggcggctcattggatttggaggtcgatgagatccccttctgaacctccactggtttcggactgctgcactgttccctcgccggagaatatctctgactctgagcgacatcgccaccgtgtttcggctgggcggcggttcgttccggctccgtctccactgtaccgtcaccctgtgcaaaaaacaagttaaagattagctgagagtggaacctccaaatggactagaagaaggactatgacgcagccagactaattcgcacctgtggtatgtttccagattcgacgtcttcgcctaaacagctgaagtttcttgctagtggagctgcatgctcactgactttgcgtccttgttccatggagcttctctctgcagaagaaagcaaataacatcagacagacgatacacagatagagcaagccggcgctggagcaaaatgacttctataaccaagctaagcagggtttctaataaaaccaccagcaacaagcttcacgttaccgaaaccactagcagggtttgattatttttttctctcaaaaccaagcagggtttggaatggtctgtgtaagcatgataagttgataggaaatgctgcgacggagattcagacacaaggtactgctcgtaacgaaattcttacctttctgaagaatgaatactccagacggatccaacccatccatatctccttcttggtcagtccagcacttgaaccttttcaagctcccaaaaaagtctatcagatgctcgaaaaaatttacagcgaccaatagggtataaacaaccataatgagtgggtagattttgttgaaggttctcccgaagaaaggcacgacgtcatcaatgtttcccattctctacatattagtataagaggtgatcagtcaagcagtcaacaactgggacatatcttgtaattgttaagattaaaaatgaaagaaaataacattctgcacttgcaatgaaaaaacgtgtcctctaaacattctttttagagaacttctatcttctgttggtatctttacggttgacctactgacttggagtaagggctgtattttaagtatttccttatacacaattaaggagatgaacttaattattttagagcactgattatatgaaagagcataaattttaataggggcctgtatttggcatgaaaactgtaaacttgcaatcaattagtgttttcctacttctctttcctggtgtgcacaaagatcatggtatttttttcctaaatatcaaaaaaaaatcatcattttccccctgagcaacccaacatcgattatgaaagtttgagatcaagaatgactactcaaatatcacatattgattttattcattgccaataatgtagtgaaaaaagtacaagcaaggaacatgcaaagaataccttttcaaaagtagttttagcattaccaccaaggtgaatgagattcaggaagttgtaagaaataggtggtgcatatcttgcaaccattctgcagtgaaacgtttgatgtaaaaattggattagaatgcaggaaggtgcctttaacgattaatgccattcaaagtatcaaaagatggaattctggatcgcttacgagcagatcataagcaagctgactgaactagtttgtcctggggtcaacgaatataacagcatcatccctatcctaatcagtgaatagtatgtgcagatgcacatatacatcaagggaacaaacgcagcaacctgttaataggcaagtctaatcagcaaaaggaataaggttaaacttattgttttggaaaaaattctttaatgaaattataccaagcagaaagaacaacagtatttataaaataaaaagaatggcaaggaaccacaatgtttgatcctctaccaaaaaaaacagattttgatgacccaccaggattttttttcacatgtgaaagcacaacagttgtgtatatcacgattgacgaataaaattgagaaacaaaggattaacaaaatctcatgcaaaagttatgtttatagaaacgtgtgtgggtgaaagtgagttccatgtgtatattttactccaaactaaaagccaatgataacaaggaaagctgcagcaactgagtggcaaatttcttacctggactaaaacttcttgctttcctgcatttataagattggagaaaagtgacagatcaacatcacttggcagcaaagtggcctcagccaacagtatggaagccgagacacatccaaggataacagcaagtactctcataaattgctttctcagtaaacagcgccaaatgaactctgaaaatgtcaatgtgcctttgaatcagtaccatgaattattgaaaattcagggtggtttgctcagaaccctatatgcattggatatgatacatgagtgttgtgtataacgtatcttcagcataaggtttactgtaaaattaggagtcatgaactaatctgaaattattgactatcagtacaacttgtagattcttgcaagacaccttcagctgttacgttatattgatagacacataagtttttattggagaaaattacctatagagtcaagaaaagaacccagtgtgcctgatcgactttccctgaaacttgacagatatttcctgtaaaagttaataatgaaatatccatgagatgcttgaaacagacctctcagaatatttcttctgacgataataagttgttaaccagcttgcaagacttggtgactgagacagttcggacaaaacataatgcacatatgctctcaccacaacagcagacatgccctttatcttttttcgaaagaatgtttaagaaacataaaaattggttatgctactaatgctagtttatactttgtattcatcaattatctgtcgattaaattaaacctaaaatcattatttcttctaacaacaaaaatgacaaataaacccccccccccc

SEQ ID NO: 338 - DNA, 2507 bp, Zea mays
aaacatgtgccctgtgtggctagggttcccatgataacatggtttagcataagccccgatggtgatggcaacttgggctatctggacgggccagccagctggtgattggtgactgcatcctagcatatccgtccccagctgcatgatattctcaatttggtccttcagtatatattgcattagatgaagtctgatgtgctgacaatgtttctgcatatgagtgccaaataggcaatttcagtattgccgcagtataatgctcatttgcaattcagctataaatcaaacgctcacatgcttgtattatattcttcacttgttttgttttagttgaatcggttccaaactatacattattgtatggagaggctcagacacatttaaaactcgcatggaggaaactgctgattattatggtgctttcagccatcttttaagtttcagaaactacatttaccctatgctagttatcttatagaccaaaggcaacttttggccctgcttatcttgtttcagctactttttgcctatggtttatgagctgaaagttgtcccatgcagcatcagatgatgctcgaggaatctttggtggtaataagtatcattattatatgacggtatcatatcccgagagatcaaatgtggtcccattcaatgaacggttcatcttggcactctactaggtgaagagcctatcaagtttgttgaggatgagtttgatgttgagagggttgtcatttggcactaggtagcacaggttgggctctaaatccagagctgtttttggaaaggaaggtccaagctatctggtatcttctcttttgtttgttggcaactacaaatgaactcaaatattaggcattattgttactaattcagaaacaaatgtagtatagcactacacacagaaccacctttttgagtatcaaagctagggagaaaacgatgtcgaccgaagtactctgtgtcggattgactaccggccactagctgcatagccattctcatgcttctggtctctctcttttcagaacgaccgtgatccaaatagatctagaagtacgtaggtaaaccatcagcatcttgtgtaaaatagacgtggcaaatgtagatgatcagaagtggcagcgctcccgtttaaatcaacaggtgcctcattcctaatgtctcaaattcctgtctcatgtttttcttctttcatcttctttttcttgcttttgcagttctctctcatcaatttatttgtttatactaacacattcaccaaaaggagaggcagtgttgggtcgtgtgtggcttgtgcagacatgtgtgcggtgccatatttataatacatagtatccctataggttctattgattgatatgtttagggttttagggttatcagtactagttggaaaccacctatagtaccagattctcaaccattactagacatctaggatgaagtcaccaaactttagtggtggttacgtggcccgatattaaagaggtgcatttataactaatccgatccaagaaccattattaaaaggtcattctttactaccctaccggtactaaacatagatttttagtacttattcgtgccaagaattggtactaagtgtccaaaggctctttttattctatatatttataaagtgatatgtgcatgtctatatgtgtatattgaaaaaataatatatacacacgcattaattgatatgtgtacaataatatatatacaaatcaatagtaatagtgatacatacaaatatacaagtaacccatttgggcggcatgcacagcagcatgagcgcgagccgttggcagcaacgattgccgaagatgaaatcaaattgctgctttacttcttcagatggctttcctagccgaggtgagatcaggaggcgtgaagagcatgtgtgggacctcgcaactagcacaaggaggcgcgtgcgagtgtaagcacacgcacaacatgtttttgcagatgtctaactaatgacactggataaaaaaatattagaaaaactgttttgccaaacgatttacaaaaaaacaatgaccgaggctatttttggaggagccgaagctctaccaaacatgttctaaatatatctttatttctatattctcaatctgcatcatctttgtcttttgatggggagattttgtccatcttaatataactccgtgtttttataagatctcgttattttatgaaccccataacttgttttgaatcgactggatcttttcaaaagggaatagtacttccatcatatattcatctttatcaactgttatttaccaaaagcattaatataaagtattattagatccttgggacttggtagtataggttggcctctaaacatcgaagctggttttagaaagaaagattcaaactgtctcgtatctcctcttctgtgtgtgttggccctacttgaattaaaatcttagcaagttgtgtactgttcgtctcaatatgtcatcgtgttgtcctggcaggcattgctg

SEQ ID NO: 339 - DNA, 553 bp, Zea mays
tgtaatattttttcggtatattttggactaaaacaaaaaatataactgaaattatatggatcatgttctaggccatggacatttagtacgtgtgggaactgtatagctttttgactagatgaaactgctaccacattatcgtcgctaacaacatgacagatagaacttgagcagaatatcatagataaaaatacgtgaaagaataatattagtaagatatgtatacgacatggtattgttgccaattcataaacaagcaagagtagcgtagctctatgcagttttgatcacgaagatggtggatcactctacgttgtcactttcaacatttgatatacaatgacgcttgtcgtgggacactcaacaaaacagtgtagaccagagtgtgcacgatagacaatggtccagttagctaccgatcgctggccctataattatttctcaagctcttgatctctccaactagctcttatagtgtcgaccatgatccgaaaagacctggcggtggacagggaaaccatttgcaacttgagtaaaatagttgtgtccgatg

SEQ ID NO: 340 - DNA, 2472 bp, Zea mays
cccccccccccccccctcattatcttccgatatagagccagcagagctcctgttaatctttgggggaaaagttgttaacttgtttatcttttatgtattttgttgacatgtctactgactacgattaggcaccacatccgtctccacaagtggctgttcgttcttcattgcacactaatctgtcatacaacaacagagtttcaaatgttggatctgacctttgtgagatgcagtcaactgagattacccaaccatatgaaagaaccagtagctgtgctaatcaaagggtgagtcccatgagtcagcagaacacaagtaaagcaaaaatgccaataggttcaatgcctccagaaataattgtaaaatcatatacatcaaggcttcttgtcggcaacccagatggtaaaatagtcattaggtctgatcaatataacagacatgatttccctgtggtgtatccaaatgcaaaattctttgtgatgaagtcctatgacgaggcagatattcacaaatctatcaagtatggtgtgtggtcaacttcctctgttggaaaccagaagttggatattgcattcagagaggctcaagctatatctgcaagtagttgtaccttgtgcccagttttccttttcttttcggtgagttgatcttaattttaaggtatttgacctctttcattaaattccatgttgttgaacttgaattactgagtccaaaattatggtcagcaggtcaatgaaagtttccatttctgtggtgttgctgagatggttggccctattgactaccaaaatgacatggacttttggtgcatggataaatggactggcagcttccctgtaaagtggcacattataaaaaacgtacataactccactttccgaagtatcttactgcagaacaatgaagataagcctgtaacctctagcagagatacacaagaggcgagctctctttgatatttcactaaatttcttacagttggaagaatattgtttcactgtttatgattggtttctttaattaaaggaaaatatgtatatgttcagttctctggttctatgatattttgatatagaccctaaatattgattccacataaatgggtcacataaatctaaggtactaccgtactagtaagttttgtttctttggatgaaactggcctagcaatagccagtaggttttatccatttgcagtattttgctgttgcacctttgacaacattgtaccttgatctgctgtttatcttgtgatctcatcctgcactctgacattgttccatacttgcatttgcagatacactacactcctggaacaactatgctcgaactcttcaaatataccagagcagacggctgtgtgcttgatagcttcatgttgcacgaggagaaggaagcaagtagtagacaactccaaaagtttaagctgcgcaggggtgctccacattttatacctgcatggcatggccctcgtccctacagacatgtgctgccaaaatctgacagtgtagtgatggggaaaattaccactgactttgagaccagcaatctggctaacaagctacagaatctcaacctggagaagaaccaggcttcatggcaagacttcaggcacctgactagcatagcttccaccaaaaagaggcagaaagactgttatccctatggaacccgggctcatggcaggagaaacaaggatattgtgaaggcataccatcccatggctcctaacaagaaatctgctttggatgaagaacatcgatactggaagaaaaaaccacaaccaggaaccgtagccagcgtctcatcaaaagcaccacctgaggagcatcagcaaggagttaaaaataccgatgcgcacagtgcattagtagctcctgagatgacttgtgaagagcaaaagattgtcgggaaagcctgtccacctgcggtcgtttcgacaacgagtaaagcctgctcagaactcctgcctggtgtggttgctattggctcaatgctgatcccgattacgatgcccaattagtagttccaaaggcatctcttgttgacctgcacgagtcaaggcctctcttgtaaatgcacgattccattttgagctcttctgactctatggtctcgtggcaaccatggagcaagccgtcttcactttaatctggcaaactagaaatcgcttataggttcaggttgtcttttcaccttttctgcgtccttgcttatgaatcttcagttgccaggtctgaactttttggttaccctagtctctggaatgggaaataaaaatacaggctgtggtgatgcgcttaaaacttctgttgaggtgggtagcagagtaagtcgcatgttatgctgaaatgatttctttgttgaaagcgtatgctgtatatatcaagtacatctttgttcgcatactctgttgttaaagctagacatgtcccgatcgtgcattgattaagggtgtgcattgggtaa

SEQ ID NO: 341 - DNA, 1234 bp, Zea mays
caatataattgatttgttgaaggaagctcaatctcttacatgccagtttgatgtgttaagtcgttttgttggtaggctcgctcaaccacctcatagttatgcacttttcaagcatcaggtaacggttctatatgcacctccattgttatcaaatgacttgcttcagcaactggaccagcctcgaactggcggcattcaggcacggagatcccaaacctatggatttatggaatgaagaaacaatttgaagattctgacttttagtagtacattgatcggcggaacaagagcatcgatccgtccatgcgatcgaagcatccaaattattttgtctttcttgaaggcgatgacgaagcgtgagagcgacgtccactagggtagtcgagcacgcacgcaggcattattaattgggttgcggtccggcaccgggcggcggcggcggcgtctcccactctctgctctattcgcgcgcgaatcgcgatgacttgactagggtctcgttttctccctgctccgacggatcgaggataaggtatttttccagtgcaaatgcaaaaaggcagaagcgggaacagcttcggaggaggctttcagttcagctcctcaaccgagacagtagccggcgtccatgggaaagagtgtgcctgtatggccggcgtccatgggaaagaggcttcgcaggaggaggatgcatgacgagttgacgacggggaagatggaaagcgtcgccgaccgacggagccagcggagttatccgggccggggcgaaggcttcggcgctgggccagacgccatgagccgtcgctttctctcgtgggccgttgggtccagccacgcatgccgcctcgtttccagtaggtgcggcgcattgttagtttaccgtttcatcttccaaactggcatacttgtgtccctgctttttaattgtccgctttaatcgcgtaatgaatcctactccacagaaagggtgtcatctagacatctacccatacccgtattatctctacactttatgaagtggagtttcgaagaattaatatgtctacaatgaggattaattaaactaatctaaaatttcttgtaataattaaattctatataatagcttactttatccctcggtgtctagtagcgagaaaaaaagttaacacccaaagttcaaactctattatatcatagtatttctgataatctaaatataagagtctaattacataaacgtaaatattcaaaa

SEQ ID NO: 342 - DNA, 1833 bp, Zea mays
cgattaaaactcttcttagtcaaaattaaatagaaaataatttaatactcctcgatctccaacccaacacagccattggtagccaggatcaactctaacgcacacatccacgaaacccgcgcacatctcaacgaagagaagcgttttttttattcctgtttaatgcaatgtaataacaagtcttatgtacagttgcaggctacaggcctactcccactgaaaagaatcgccaccgaaccatcacgactctgccaccgccagcgccacagccaccacgttctgcccggcatccagttcttctgacaccgcgttctggtcgatgaagttgaacagcgcgagccccgcggcccacacgtcgttgtccatcaccgactcctccggcgagtggctgatgccgccgcggcaccgcacgaacagcatcccgatctgcgaccacacaatccggagcgtgagcgagctgagcttcactattcagcacactagtcaccgccaacctcacattcgttcgcacgcatgcttcgtcttcttaccttggtgagcctggccatcgccatcgcgtcgtgccctgcgccgctcatcagcacgggcgtctcgccggccgccacggtgcgccccggcattgccgacacggtcgaccgcgccgcgcgcttcagctgagacgttaactccgggtcgcagtgcgtcgctgccgccgagtgctggtgcaagcgacatcaaggtcagactcagttcggcagcacaaactctacaccggcagatatcatgagccatgacaccaagagtgctgattcggtgctcctcctcaccttatgctcgaccttgcaatcgaccagtctgtcatcgcatttctggagaacaagcctcgagaagctcgtcacgatcgtctccctcacttggtcgtccatcgcgcggatgtccaccgtgaagtttacctgtcgtgggcacagctccaaggttcagctgactgatctgagccaccagttcatcagcagggccaagaagagtagtgcttggcaagcttacctggcccggaatcacgttgctcgcgcttggccacgtgttcagctcgccgacggtgcacaccaggccggccagggactcctcagtgaagcagctgcactcctcgtcgtaggtcagcaaactgttgggctctttacagaggcgttccagagtcacaacgagctctgcagctgcaaccatcggatcacggcgcaatttcattggaactgtgccagcatgcccttgcgaaccatctactattacctaggcaaacaaaaacaaagactaagcgctgtaactactttccttctcactcgaaagcttggtatacaaagggacttggaagcaacccagaattattaatgacagttgtcgtgggcagcttgagtatttaaatgtcaatgttaaactgaacaatcttggtgacagcaatgcctgtcttcctgaacattaattaactaagacttgttcttgcatcaaagatgacacatgacataggtgtgccaattattgaatgagatggatgttgactaataccccaggtgtttctctgattgattgtttatccattacatgcacatacttggttaacttaatattgaccactcataccctttgctaagagaacactcctatctagaattatttgattgcttacctgttgactgctatactgtcaccttatggttatctaatataaccggtacttcttttttctcagacacatatagtaggctctgatattgattgttttataaggaaagaatgaccttacggtaggaagccatgcagctagaccatattttagttttgtaaatgtagttcttgaataga

SEQ ID NO: 343 - DNA, 768 bp, Zea mays
tacttgtaaaattgattcaggtagtgtaccagctacagcagcgcttcccagaaaagttgtctggaatctgatgccctcctcatcgctgaatgcaatgacctaagcttcaaaaaggaaaaatgagtgctaggctccgccatgatgatttttccaggtgacgataatgcaatctaactaatgctgattcataatttgataaaaaaaataatcttcaagccactttggattagagcgttgaagccatacagtgaagaataaaccatgatttggttcacaccaaaacatgccgaccttgatctatagatgatatctagacatttgtttactgaaatgcatgacacaacctgacaacttgtgcattttgattatcaggattgccagaataacaaaagatgaaccgtgcacagaatcttttcaagatctgtaggaggtacgtcgaactgattaaaggggcattataaaactagattcctccaggtttctatagtctttcctgattatattatgatagtaataaagaacctactaggtaccttgcagcttagctatccaatcagcatcaaaagtacaatatataattaaaactgagtaaaatataataactctatgcctgctactggcaataaaacaatgtgaaatattccaatcaaacaaataaaagagtagatggacacaaacaagatcaatgcagacaagtgcgggtctacaagacgtatgtggctcataacgccacttgtagagagcgagaatagtggacaagttgtcgcg

SEQ ID NO: 344 - DNA, 964 bp, Zea mays
gaaagtattgtcaaaataattttaaacattgtgaaagtaatttgaattcataaaaacacgtaaagtatagaaattgtgcaaaattacactctgaacaggggcattagcgcattatcccttgctttttttaccaagacttaacaccgttaagtacaactaaacgtgttatggctatacaacattttgttttgaaaaacaggagcaaacacgcaaagtctaaataaacagaacaaatctgcagttacaccttaaacaggtgcgataacgcaattgccctagtaataaaactatgcatatttgccaaaaaaggcagaatagtagaataacaaaacaatgtacacagtaacaagtaacaaaaatttatactaactgttaaaaaggggaaaaatgtaaatttccaacggcaaaaacatctcgcctctggaagctccaactccaggttgcttgaactgtctgtaattcttgtatacctgtcctgtatacaaacttgtatactgccgtcccgggaagggagtaaagaaaggaggggaaaactaacatcagggactgaccgttacatcgacgatgacctataactataagttatactgtgggaccgactcttcttttttgctctaccaccgcagccgcactctgcatcctccggtgaaggggccgcaaggatgggggatcttattatacacgaaacaaatcaataaataatggaatggcgcgggggaattacaggatgaacaagaacaatgtggtgttggtgatggactgatggtgcttggtggactggtaaggaggaggtgatggtgacagtgtgcgtgatgcttcgcttttttttttttgggttcgaacgcgtatacgtacggtttgagaagtgtgccgcccgcgcgcctattgaaccatggcaaggaaggcgctggtcggagccgaagtcggcaccgctggtgcaggcgtcgtcgctggcggtgctggt

SEQ ID NO: 345 - DNA, 1288 bp, Zea mays
ctgtactgcattttgccgtcgtcctcgccttcctccccgtcgtcggtgtactcgtcgctgtccgtttcgtcctccgtggtgaactcccgaggcgggtgctcgcttaacatcctggtgatgtcttctggcttcacagcaagcacatatccggtcagcctgcgcgcgtcggtctatccagcacgaaacgaaacgacaaaaggggacgaatgaagaaacaggttggcgcgcacggtgtcgttaccttcttcatgccggtgtcggtgccgaaagcggcgagcgtcgtcgtcggcgctgtctcgccattgctggtcggcggcacctgcgtgcctccacctgatcccccgttgttcctcttgtcgtcgttgatgttcttcccttctatctcgtgccggctcgagttcagctgatctaggtaggcgggagcaggaggagcggcagcggcggcgccgccgctgcggaggtgcttcctgccgatgtagatggcctcgagctggtggaagtacgggcaggtcttggagtcctcgggccgcttcttgttgctctccttcaccttcttgtagtacttgttgatgttctcccacttctccttgcaccgcttcgagctccggttgtaccccagccgccgcatcccggacgaaatgtcctcccagagcggacccttggcacccgtctccaggtagcgcatgtccaggtccatgcgaagctggatgagcgcgtccacctccgtcttgggccaccgcgatgacgacgccgcccttcctagccccgactcgacgtgatggtcggcgacgggcaccagctcgagtgacgggccagaggtcgcgggcgcgctgcgcggcgtgccggcgtcctgctgcgacgcatccttgggctgctgttgtgtcgggtgctgctggagcggcgcggctgagattggcttcggctgcggtgtcgcctgtggcgacggcggttgctgctgacgagaaggttgttttggcggcggcgtggtatgggcagcaggcaccggcgctggcattgggacgacaacggcggtagggggctgcacggactgcccgccgatgcgctggaggaaggcgatgatggcggcgtccctggaggccgcggcggcgcgctcctgagcgagctgctcctgctcgtggttgaggcgggcaacctcctgcctgcgacacgcctcctcccgcgccgtgcgctccgtctccactctccagcgtctccatggtctccaggaaccgccgctgcatttcctcctgcctgtcgacgacctgctgcatgagcccctcgaagaaag

SEQ ID NO: 346 - DNA, 1448 bp, Zea mays
cgcttgccgaggcggtcatggcttccgcctgtctccgccgtcatgtcatctccctcggactccgattccgacatggaagagaagctgaagccttgcagcaggttgaggggctggtgggccccgggcagctccacgagtgtctggacctgccccgccggtgccgccgacgatatgggcgctggctgcatcggccccgtcggcggtggcattgaacttatcggcggcggcgcggatactggcgcggcgaaggcgtgcaacggtggagcggtggtgctcgctggcggcaactgctgctgctgcttctgtagcggcggctgtggctgcggcgcggctgcgtgcaaggcctccagctcgtcgaagaagcggtagctcttgccgtcctgcctgccggtgcggccttcctttgtgcgcttgtagtacttgtgcacgttctcgaacttctccttgcacttcttggcgcttctcttgtagcccaggtcggcgagcttcctgaaagccacagcagtgacaaaaaaagaattgagtgatcggcgaggaagaagaatttaagtactgacggcagcgtttacaggaggaagagtggcattacacatatggaggaaagagacaagaggatggaaagaattggaaatttgtaaaaggacaggcaagactgatgaggagcgaaagcgggccgaaggaggtagaggagggacagtcagtatgctgcagaatggaattctatatagctctcatcacagaccatagcgtctttttagggatcagaggggatgtgaagttgatgatcgatgcactagtgaatgaatactggagtgatgagggggaaaaactggagcgaaggagagagagagaaaaaagaggtcgcattgggatgggagagaaaggctggcctccttgtttacccaaaatctggagccatgaaagcagaaaacagtggcagactgcatgcagcggcggcagcagctagccagctactagctgcttgtctgcctgtactcgcacaccgtggtacgatacgatccccaggcgtccaaattcttcacccctactgctggctggcttggctgctgccatccaattctctctcttcactctgcctccccctccctcctcttccctctcgctgaaatcgaggagcatttgattagtactagatcgggacggaaacgggaaaacaaagcaagattcgaggggaattgggcgcgcagcgacgcatgattaattatccatcatttcatgtgggggcgtctgctgaattccacgaaaccgttagcgctttcccgcaggggaaaaaatcatgccggaggcaggcttgttgagcgtgagccggactgcaaatgcgtttggattccgtctctctctctctctctcccgggtctctcactcactccttttacctggagacgtcctcccacaggtggcccttgagcgtcgcgtcgcggaaggtg

SEQ ID NO: 347 - DNA, 999 bp, Zea mays
tattattattaaagagtaaagatataaagatatctgaggcacacaaaccaaaaacaacgacatatgagcttggatttcgaacactaactgcgaaaaggattagctacgagccatacaacattcaacaacacgtactaatgtctagcctccaaaaccagaatggatattatatcacgcccaacgccttcctccgatacgccttgcaagttgtatgtccttgtgcactgcagcagcaggaaggaaaacatttagggtaacacatttcctatagatccttgaatttatcaatcaatgtttgcgtttgtataaagctgaactaaattcagcaccagtagagattttttatcccactctctaagtcgtaattgttataataatagttactatttgttgatgtctttgttgataatcaaaccatgtaactggttcctttgttgataattgatgtctttgttggtaatcaaaccatataaatggcctactaaaagttaacaattgcactatgcgctatttgaacgttaccattatatttccactcataacaaggcaattcgccacttgaaataatatctagattccatctgaagcagaatcactaaagaatcgtgtaataaccaaaatgcatcacacatatcattatattaggagtaataaatagtacagagtaaaaggaggagttcagtctgtgacaacttactgactgtgacacgcttggcatggatggcacacagattcgcaatttcaaacagttctatcaagtggaattctgctgcctgtagacaaggaggaaaaacaataaaagaatctaaatgaaatcaaacattaactgagacgtaagacatgtttcataactgacctcttgcagagcaaggagggcttctggggtatagcgctctaccttcccgtttgttaagaaattggttaactccctcacctgcatatatatatatttttttcagaagaataactttccatcagacagaatgcggaacaaaccca

SEQ ID NO: 348 - DNA, 586 bp, Zea mays; identical to SEQ ID NO: 335

SEQ ID NO: 349 - DNA, 1039 bp, Zea mays
actgatgacttccatttttttctttacatgccaggcaatataccacaattactaagggcagtgcaattgcaaatatacaataagcagttaataatagtaacctctacctttcagtgtttgatgaaccacctagaggagtcgagtgcaaggtaaactcccggtcatacagtggaacagaaccatcatctactgtatcactttcccttgcttggttatccacccaaaaggacttgtcagaataagaaaaacaagaaaacaaaacaaagtgaataactatattccagttaagtatcccacaaaaagcagaaataaaccatagtacaatacagcaatttgtttaaagattacatgaaatgttagatgcatattatcaatcagtacagtaacaaagaacagaggactatgcccatgtcagaatatgtagcatagttgttaaggcggtaaggcgagataaggcggccgacccctttttaccttttaagcggtaaggcgtaaggcgtaaggcaaggcgacgcctaactaatatataaatataggaatatgatcttaaataggtagggatggtagtacaaataagggtacaagttcaacctaaaccaacataatagaattaaaatattaacataactaatagatagtagtagaagattaggaaaaaatgaatacataactgatagatttactggtttaatagagaagtaaaaagaagagaaaaaataagagtttaaagacatatgggccatcagactgctatttcccggcccagtcagcccacttattgacctaactccatccctcagctgcaccttgcagcagccttcagccgccaccctgcagttgccagagaggggagagggagtcgccgccagagagagaggagagtgagcaggggaggtcaccgcccgcacacctgagagagagagggagggagaggacgtgcgcgaccatctccgacccgcgcgacgctgccgcgacctacgccgaccagcgcaacgccgccgcaacctgcgccgacccacgggacgccacgtcttccccg

SEQ ID NO: 350 - DNA, 1730 bp, Zea mays
atgccttaggctcccaggcaaggagacgcggacgccttatggccagagcacgccttagcatttaggtgtcgcctaagcatcgccttagggacgccttaacaactatgatatgtagtactaaaatgaggtgtttcaaatgaaaataataaaagcatatggctgcaagtgggaagtaacactgcattcagattccaaagtttatttctgttgaatacgaacacagttgtagcatatttgccattctgaacgcgtaagattgatttagtttccaacatgtcctcaaaggctaagcgtatctgaaggaagaggctaatgtcaccagataaatagaaaaatggaacaaggaccaaaacatggaagtccctactgcaaaattaaggcttacacatgggattatggggaaaaactattttcaaattagcacagttagatgcacatgcactatcatatgccaataaaggacatactcactttaccaggtaggtagctaagtcaagagtgatagcttaccaagaggcggtggaatacttttggcaatggaaagaaaaaaaacatttaaaacaaaaaaataggaaaatgaaaatagaaagcaacaatacattagagcatctccaagagtctctgcatggctatttatcacaaattacaaaatttcaaaaaaaatcaggttccaatagactttctaaccactctttcaactctccaaaaccactcttgttgctctgcactagcgaagaatctacatcactctttaaattccatatatagtagttctatcataaatttttgacacaaggaaagttactacaagtcattcgagtatagaactatagataatgaaattaagagagtccatgggaaataagagatacataaaagagaatattcatcggatggctctccaactagagataacagagatagaattttagagaagctctttgagttactattagttatcacatcaatcaatttgattttttatagtacctatagctaatttgacacatgttgcaagaaactagaacttccggggaccattccagaaacctacaacttcctcaccagaaacattgaaacatgagaccaccagtgacatgctacaggggctgacatgtgggttcacggttagaaagttatagtgatggtcttctgcaacaaggtgccaagaactcaaaataattgtaggtttctgcaatgagcaccagaagttgcttcctacaaatgtgtcaaagtagttgtcaatttttaaattttacttttaaagaaatcgttttagaaaaaagaacaaaatagacactaaaatgcatgcagtcttcataagtcaaaaagtatgaccacctctgtacatttagtttcttagattgcaaataattaagataggttttacgttaaagatggtgttaatgcccaactgtccaagtaacacccagctgaagccagagcataacgagaaaaagagaacacaagataaatcaccaatcatatattcaaagtaatcatataatattgtttctggacattgtcaggtcaacttcaacataatgacatacataccacggcacaagatttctcagaaccaacatgtaatgcaggataataagtctcttcaccactttctaaggtcacttccacagcttcctgttatttccagaaggaaaataaatgtcaagaaacttcaattatatcatttctaaataattctttctgaatgcaatatcttcttgtac

SEQ ID NO: 351 - DNA, 3203 bp, Zea mays
taaaacagatttctaaatttacaaactcctgaccaaatctaatttgatccctacatttatcatcttgttgggactcttgaaataaatgtttttgctaagatattgcgataagcatactctgactacggtttcgccgtctctttatctgccaccgctagataacctcttgtgccaaggtgtcgctagagcacctcctgtgctgcctccatgccgtagttgcgagggcgtccgtggatagtgtgtgctgttgttgcaatcatctggtccatcgacaactccgacctcccaaaacgttaaggaaggttattggtataaatttatgccatcaactcgatttaaaatagaaagtatgtcttttttttacattgacaacttaaaaaattaccaaccaatgttggagcataaacattttttactcaagtgttatagtaactttctctataatttagaatgctaaatttacataacttggattgctttatgtttgtcttgaagtttgatcttcaacagcccagggatataccaaatttaaagaaagctccataaatggtgcagttggcccgttaagtcagttattatgcacccctactgatgatagaatttggcaaaggtcattgttgttagttgtaactgctcaacattaaacctaaattaaagcaagtattatttacaccaggaagttttggccatatccccacaaaaactcacagaagaaattaaaattctctatatacagaagaacaacaaaagctgaatcactagtactttcctctgtttcaaacttttcagtgtatgccaagagcctggaatctcctcactagagcaagattggtcgcgttcctcctctgccagtcctccgtgctctccttcctctgctccagcttgtccagcacgtcttcgttgccgtccagaatgctcgcgatcttcctcatgctcggccgcgccgccgggtctgaccgggtgcacgccatgccgagccgagccagccgcacgagctccctacggtcaaacttgccgtccagccgccggtccgccagggcctccaccggccggtcctgctgctcaaggagctggaccttcctaacgaggaggacctccggcagcctcccgtccacggccattgtgccggtcaccacctccagcaccaccacgccgaagctgtagacgtcggccatggtggtcgcctcgcccgtgtccatgtactccggcgacatgtagccgaagatgccccgggccgagctggcggtgaccaccacgtggtgcccgccgccgtggcgctcgttcctcgacaggaactcggcgagcgcgaagctcccgagccgcgggttcatgtcggggtccaggaacaccgccgacgacgtgatgctgcggtggatcacctgctcgtcccactcctcgtggaggtacaggacggccgacgccagcgccctgacgatgctgtaccgctgccgccacgggaggaccgcgccgcagtcgcgccgccggagcaggtggtggctcaggaggctccccggggagtagtcgtagacgacgagcatctcgccgtggtccgtgcaccacccgcgcagctgcacgaggttcctgtgccggagcttggccacgttgcatagctccctggcgaaccggacgcgcagcgccgggcacgtcttcatgccgaggcgcttcacgaggacgtggacgcggccgtggccggtgtccaggaagccctcgtaccctgtcccgaagtccagctccgcgaccacctgcgactcggagaagtcgttggtgatggcgacgatctccttgtagggtatctcgcgcggcgtgtccacgtgcgggatcgccacgggcgctagccgagacgacgaccgccggccggagtcagcggacgcggacctggaaccggtcgtcctcccgtcttccgcggtgtggtagatggtgtccgcggccgcggtgtcgtagacggggttggaattggttagagacgtcgccgccgtgctcctgtcggtggtgacggtcgtggcgccggagtcggaggccgacgacgaggtgagagagatgtacttggggagcgccacgaacgacggcagacgcgggaggtcgccagcagagcagccgtcggagaggttctctaccacccacctcatggtcggacgcgccctggggtcgtgcagcgagcagaggagaccgaggtgcatgagccgcgcgacgtcgaacagcgcagaggcgccgtccggcagcttcgcgtccgcggcgttgagcagcttgccctcgtccgacagccgccgcacccagtcgagcatgaagatctggtcgtcggggtacgccaggtcgacggcgcgccgccccgtggccacctccaggagcacgatgccgaagctgaagacgtcggacttggcggtgccgccggcggcccggcgatggaagctctcaggcggcaggtacccgatggtcccgccgatgcggctggtgtccatgagccggaattggtagttggccgagaccgcggccgaggcagatgacgacgacaggcgcagggacggtggcgacgcctccgggtgcagcgggttcagggcgtcgtcggcgcccaccgcgtgctcgagccagcgggcgaggccgaagtcgccgagccgtgcgttgtactcggagtcgagcatgacgttgctggtcttgacgtcgcggtggatgatctgcgtgtccagctgctcgtgaaggtagaagagcgcggcggcgagcccggcgacgatgcggcggcggcggtcccagctgagccgcggagccgaggccggggccgcggccttgggcggcgcgaagagcaggcggtcgaggctgcggttgggcatgtagtcgtagactagcatgagctcctccccggcgcgcacgcaccagccgcggaggcgcaccaggttgcgatgccgcagcctggccacggccgcgagctcggccaggaacgacttgtcgctgcgggcgcccgcgctgctggctgcgacgcacttgacggccaccgtggtgccgtcgctgggcagaacggcgcggtacacccggccgaatcccccgctgccgagtacctccgcgtcgctgaacccgcgcgtcccgatgtagagctccgagtagctgaatatcctgggcccgccgcccgcgagctgcttcctgccggcgacgtcgtcgaccacgccggcgatgtcctcgaacgccgccgccttttccgaagagtcgtcgtgcca

SEQ ID NO: 352 - DNA, 2458 bp, Zea mays
gggggggggggggggtttcggcaggtaggtagagatagaggccatgcaaaacacagaaatagagacatccatgacaccatcgcgtggctacatctacaacattgtttacaccaaggcagacattatagccagatgggacgtcattgaccaataggggttgatagccataattcaatatgtgccacctgtcttaggcgaatagggtgaaaagagggcaactttattccaaataaggggtctgactcatggctcacgtagcttgatctggaaaggagtcagtttggcagggaatattcattcagcagatcatcaattaggcagaggagcttttctcagatggaacaatgtgagagactaaacttgtctgtgcagcaaaacagatttattgtatgcccacattcgcaagaaaatttgggtggaataaggttgtcctgcaaagcaagttttttgctaggcaaaacagtaaccagtaagtatcaagcaaaaccattgtagataagaaacttacagaccaaaatatcaaaaatgtcgctacagttttgagtttctagtagcttattctgttacatatttacatgacacaacaaagtcattacacatgctattgctacctcattcttagatgacaagttagtaacaagagatgtttggaactaactaaagatcaagggaagctaacaacaaaacgaagacatgtctaaaacaagaagcctcaaaatttagctctttaatggtcatatcaaatagaaaaacaaaagagaaaggtttaaccagatacatactgagcacattctgccaattttcctaggttctgattttccaaaatagccaaaataagctgcttattctcatccagatactgcagggaaaaaaacaggatcaatcagaaaagttacaaatgtgcaacagatcaaacataaaactgattaacctggaatagaaagccaaatgtgccatataaattaataaacattgatagtaagtcataaaattgcaatatagaagacaaggtagtcctgtgagaatacatggaaaatctagattatcacaagatatttataaatcaattgaatgagcatataaagaacaatacaagcatagctggtctggtgttagatgtaaagtatcaaagatcagttagagtctgtctagaactgtattcttgaactgcgaatgtttcggtccagtgggctacataaacatggggtcattgctatgttgaaacagataaggcccgtatttcactctatgtttttctagaaagaaccaacttggctacaatagtttggaattatgtaagtaaaacaaagataaacattcttcagcgcctatttataagcattatatgcattggcagtctacaactaacaaaattaatattagttactagaaaacttaagtacaaaattcagaaaaaaaaacagacaataagcacgaaatcaatatatgagagaccaaagaacaaattagcaaagctgtcactttttctttttaactgagcaacaagttgaagattaaaaataagaaagataacattacatctccaatgaaaacatattgaggcattcccataactgggtaaaaaaaattactactgctagttccagctataacttggaaggtatgtcaatcataaactcatgtcccgagtgtgtgtttgtaatccataaatatgccgctgattctccatatgagccacggcatcttccatcacaacaacaaaaaaattatgccatcaagagaagggaatgtacacacagagaaggattgcaggttacgaagtgaagagtgtcagcgtgaggtcaacaccacaaagcacatatggaaaacatcagtttccttttgttcgaagcaatgtgacataaggccatgctacaagaaaggactcaagtcccattacccaaaataaatgatacattgaaatgttgtgctcctatacataaatggtcatatccttcgtgtggtaaaatatttggtgcaccgccaccataagaagacaaatatattatcaacgaagcatcaggattcatgtctgatagtttaaaaaaataatccatgtctgagagcaggatcataacatcataccaaatatccaatagatcaacagaactcctacaccagcttcaggtgacgcttgtcaaatctaccaagaaatctagaaagaaacatactaatccactaatccgatacatcagtaatcgatcccagctcatacggatgaatgcattagattggactggcaagatgatccaatctttgaccgaaatggcgcccaagaaaaccccacacgaagcagggatgcgaaccctatcacaactgcgagggggaagtgagggagcaaagaggaaccttttggatctgctccgtgctgattccggcagctggggttatcgccggcgcctgtggctgcatgtgcatcggctgctgcatcccttcttctgctggctttggtatctcg

SEQ ID NO: 353 - DNA, 4600 bp, Zea mays
caggcttcaaagttccaagctgtccaggtaatctgcggattatttatatcttaaagcatatttttggcctctaattttttatgcacaggctcggctttatgaagggaaagaaccaatacagttctttgtcatatttcaaagtcttcaagtgttcaaggtttgcttcgaattagcagtcaaaatccttaacatgttataaaaaatcttaatacttctatgttgaatgctctataagtttcctctctttctgaattttcaatatagggtggccttagctctggatacaagaactttattgctgaaaataatattttggatgacacttactctgaaggtgggattgccctatttcggattcaaggttcaggatcagaaaacatgcaagcaattcaagtagatacagtaagtttggggtcatactttggtttgtcaagatatttgtgagaacatcagtcttatcttcattaatgagcgtcttaatctttctcatctttttgttagctggcttcgtccttaaactcgtcctattgttacattctccacgatggaaacactgtgttcacatggactggcaatgttacgacctcattagatcatgacttggttgagaggcagctagatgtcattaaggtttcaatattctttctcatttgggtgaatacatcttcgtacaatacagatttcctgatgattagcaaattggcagtttggtatcaatgtaaaaccttgactaaattcccctacaaaggttttgcatgtttctgatagaaaatagtttgagtatgttatgcacaaagcaatgctcaatgacacttttattcatgtcacatgttagtatgtagtctaactgctaaagaaaacaaaagaaatgcatgtgagagttaattatttgatttctatgatgatgatataagtctgatagttatcaatggttactagtattggaccagcatattcttggtcttgcggcaacttatatttttcttttgcaatttagtaaaagaaaattagccatgcacatgaatgtagtgcaaatcgatatgactaatagttacttggtttagttgtttgttacaaatgtgtttcatgttgtaaatgtatatcatgttgagtttctttagtatgttttagttgtgctagattttggtccatttgtgtttgttggattgtatgatggcaacaaaacaacgtataggtcttcctctagactcatatttagtatagattggatgtttataccctgttacattgtcattgttgatgctgaatccgaccaacacaatagtaggggctagatcgcccgaggctgcatatagcctagatacatagttcagttgggtctaaatggcaaggctgatgtgcaagtcaacaaggccgatttgacacttcttcacccgaaaaacccatgaacaactcctagaaagacacgttcgagagacacacatcaggggtgtcctaggatcgacaaggctatctagaatgccatcgagtcttgttgagagacgctcaatagcgagaggttggaagaggtaaaaagtagtagattgatttttgatcaattgtgtagtcgaatacctcaatcggacctgatcctatgatatatgtaaagggtgtggtcttatcccagtaggaaattttcccaagacatattctacaatttatccacgagattagaggagtttgggttagaattacgagaagtggactcgaacagggcacgtcggaacttggaacttttgttgaatgttggaacttccaatgcccaactcccgaacccaggagccttgcaagttagaactttcctctgaccccttttgctatcaactgtcaccctccttgtttttatgtggttttaaacgtaatggtaggaactctgcatttcactcgagaagaaatagaattacctttcgcttgtatgttttttgacaggtacattagtcgtctattttctgcttatttggctccaacatgtttttcctaagttttaactctttttgtgcttctattttttattgtacagccagatctaccttccaggtcacaaaaggaggggagagaaaccgaccaattctggaaactactgggtggtaaatccaagtatccaaaccaaaaaattgaaagagaaaatgaaagtgatccccatcttttctcgtgcatcatatccaaaggtaactacaaacaaggattttctaagttgaatgcactgttcaacatatactgacacttctcttctttggctactaatgttgttgttgggggttgtgaaggcaatttaagggtaaggaaaacaaagatgacatggttttattgctaagtgctttcttgatttcatgtctaatacaaacattatttttaaaatgtatatcaggttaaagaaatacaccactttactcaggatgatcttatgacagaggatgtttttgttattgattgtcactcagacatatttgtttgggttggccaggaggtggatgccaaagtgaaatcacaagctatggatattggagaggttaaaccaaaattatcctctataaattagaaatcatgatttttatttatttctcactttctttctcactataactgctagaaatttattgttcatgattttcttatggaaaaactatcacgagaaacaccaatattcattgtgtcagaaggcagcgagccacaattttttactagattcttcaattgggactctgcaaaatctcatgtaagtagtttgtgtcctgcacttgcttattgtgaattaacaccaattctattccatgagatttttacacctatgtatgcatgcctggtatttagcattggaaattaaattcatctttgcacttctgaatttttgttgcagatgcatggcagttcataccagaggaagcttgctatcctaaagggtggattacctccatcactagaagtaagtctcaaacaaatgatttttctagtagctcggtggaaatcatcttctacccgctttttgtgaatttagtatagtttctatccaagtatgtggttgcaaatcaacttttggttcatgatatgcatgtttgttgatactcttgctttctcgacattgttaacttcttgtgcgggtatatagatgatcacaaatttaggttttcagtattttaattaggaatactatgtcatttttatgattgagcctcaacatatatatatgttgaccataaggtttcagagaaggaacatagggtggctaaactagcgtctaagttgaagtcttgctatctaaaagcagctctcttactatctccatgttttcagaaaccaaagcgacgaacaccagcatttacgggaagaggttttggacaagataaatctcagcgttcaagaagcatgtccactagtccggatcgtccacgtgttcggggaaggtctccagccttcaatatgttaacttctgcctttgagaacacaagcaatatcaggaacctttccacccctcctccagctgtgaaaaagcttttcccaaaatctggaggtcctgaacactcaagggtatcacccaaaaaatcagctatcagtgccctcaccagctcttttgaagcacccctaaaaagtacaataccaaaatcggtaaaaggtataatgaatacaactcttcaaatatgatagagcacgggtagcaaaagttctagttcttatatatcttgtttctttttttgcaaaactaagcgagccctgagccagagaaggcgatacaggagcaaggtgtcgtaggcggtgcaagtgaaaacaaactagaagacgacgaaggccgcacgatctacccatatgaacgtctaacaaccacagctgaagatccttcccctgacattgatttaaccaaacgagaggtaacaaactaatcttcctccttccattcatacatgtttgttagatcaattgatgattccatttactgttatcaactaaatgcagtcctacttatcgtctgttgagttcaaagacaaattcaacatgacaagggcggtgttctacaagctccctaagtggaagcagaacaagttgaaatctgatgtccagcttttttagtcttcccatggtcgtcttgaattttgactcctgaagacagtaactgtttgtgaggaggaaagacaccaattttcatgtttagagctcctatcttcacctagttagggtttgtttggattctttcttctaaaatttagagctctaaactttagagataaagatctaaataaatgatctaataaagttagctctaaaatatagctcacctcatattagagctttagagctcaaaagtgagttagctaaagtatctaaagcttttagagctctaaaatttagaggggatctaaacagggccatagcctattctttgtgaaagtacttgttctttccatttataggatctaagatccaatcagagatcaagaggattggaattccatagctcacttgagttgtgggggtctttggattttggatcacgtgttgatgttttttctagtttggccaacgtttgtgttatgggattcagatcgcaaaaggttgccacgattagatatacttgtactttctcgcaatacaacaacaatgcatgtac

SEQ ID NO: 354 - DNA, 1230 bp, Zea mays
gagtcaatgcactgttcaggactcgtcgcttttcctaaacacatgctcagactatattttgtgcgtcacaacttccacatcccattataaaagaatttccccatgacacttggtcttgtttgagctgtccattcacactcccacttttccatagaacatcacatttgtcacgatatctctcgaagcactttctaacctcatcttctcctctgacgccagattcccaaactacaatcatggttgcctctcattcgcatgaatttgaggtcgccataattaagtccaaggcccttaaatctttggtcatgattgaattacttcaagagaaaatataatccagtggaaaattacaggtaaagaaacctatcccatgactaatgctgacgagatcaccatcttttcttccttcttgatgcaaggatttagtctccctcttctcaattcttctgggatttgctccattattatcaaatcgagcttgttcatctcaaccctattctattctgcacatcaccatcttcgcgcacctttgtgaggcatatttggaaattccttctgtctttcccccttttagtatcttttctttcgctggccttgtcccagcaaagaacatctagctatagttgggattaagcttcgtgctaacaactaatacctcaactgtcctttgaaacctcccataaatactagcacaaacttttgttttatgttgaaaatcacgcccccaaaccacccgagttccttggaaaacaccctattccttgacttgagtagatgagtgacccactatccaagcacatcgatgccatctctgctacgatgagcaaaccaggagttgagagccctcgtcctctcgatggtgcatgtggtagggagctggacctagcgatgagcccccctccatgagaaagcaaactttgcatgtgaatatgatagagagactaatccctatcaatcaagagttcaaaccatcattatgccaaaggcggaggactagcttcaccagggattctcacccatcgaagactgaccaaaaggttgattgacaaaggcatattctatacttaagccatgacccaaggtactttaaggactatgccacttatcatttttttctgatcttgtttaactctgtcataatcattcctcacacttttaaatgctaaaacattatttgcttttacataaatttacttgggcaccaatagatgatgaggaacctgactcgag

SEQ ID NO: 355 - DNA, 957 bp, Zea mays
atcctatatttggcatttagatcaggaccctctcggtgacttagaaccggtgacagcgatgacccacataacccttcagccataggtgtcgccgagccagaggtctatgatgaatcgacctctaagaccgagacccaaaggtgctcctctactccaccaaaaaaatttcaaagaaattgcatgactaagattgtgaagcttcccacaaacggctgatgcaagactatttcaacgacccatgtgtctatcccctactctactttcgtcaaaggcaccacatgcgaaggagtctttttttcttcaaattttaaagaggttgggtaagcattccccctattttactatttgggtcatgtcactcaaccgcaatggtttgtcccctcacaaaaaatgcactgcttccctccacatgcttgcctatggtagcattgctgactacattgatgagtatatcaaaatagggaaaagctctcccttaaactaccttgaatatttctataagggtgtcatttcatgttttggtgaggagcatagttgttgtcatactactgatgatcttaggcgtattttagttaaaggagaagagagctaatttcctagtatgatagagagtatatattacttgcaagaaattggaggaactgtcccattgaatgaaaaagggtagtttactacgagaaattggatctccaaccatcatgctcgaatattgactccaacaaacctacaagcgatctgcaatcatcgcgtgaactacacagataggcgaatcattagggaagcgaggccatatcgaccgaactagcaaagtttgcgatcgagaactcaggttgaaaaggaggatctagggcttcagcatgagcttggatgaatctcgattgtatggagccccacggtgcctgcagatgaagctcgcacacaatgacatcgtcggtgaggaggacagaccgtggacga

SEQ ID NO: 356 - DNA, 1610 bp, Zea mays
acagaatttgatctcaacctacctgtggatgagtttggtgcagtcaatttcgacttcgttcaaaacatgacaggtaaagaacatgtccaagtttgttttgcagacttctacagctcgcacacttgctcatgtccatgtttgttttgcagaacatgttgttgaggctccagttccggtgaggcaccgacgtaaagagatggaagaagctatcagaaaacaagtttatcaagcattgttggctagaagcaataatgggacactccacaagaaagatacccaaattgtcgcagatcaatttgatcttcatattaggtcagttcaacgcatatggaagagaggtaaaatacaacttgcaaactctatcccggttgtggtctctagtctaaaaaagggatgagttggtcgtaaggcaattcctattgatttggaagttttgcgtaacattcctctaaaggataggatgacattagaggatgtttgtgccaaacttgacataagcaaatggaaggtgctaaggtatttaaaaagagggttgcttaggcgtcattccagtactatcaagccttatctcacagatgttaacaaaaagactagattgaagtggtgtattgacatggttaataggccggtgaatggtgatccaaggtttagggatttttttgacattgtctccatcgatgaaaaatggttctacttaaaccagaagtctgaaaggttttatttgctccccgacgaagatgatccacataggactgcaaagaacaaaaactacatccctaggcttatgtttttgtgtgttgttgctcggccgagatttagacatggagagtgcatttttgatggcaagattggttgttttcctctagtcacgtatgaaccggctataagaagtaatgcaataactggccgtgtacggggagatatggttatgaagcctattcaaagtatcacaagagatgtcgttaggggattcatgattaatcaagtcttgccggccattagagccaagtggccaagagaagatgtgggcaatcctatttatattcaacaagacaatgcaccttcacatctaaagttagatgatcctttgttttgtgaggctgcaaagcaagatgggtttgatattcgcctcatatgtcaacctccaaattcacctgattttaacattttggatttgggattttttcgagctattcaaagtatccaatacaaaaagaatgcaaaaactctcgaacagctacttccagcagtacaacaggtattgtgttcacacattctttctcaaattgttcacacattcttcatcattcaacaactaatttcatcactgtttttcctctaggccttcatggagttctgtcctcgtaaagcaaatcgcatctttgtaacactacaaactgttttattggaatcaatgaagaagaaaggttgcaacaactacaaaattccacacatgaataaggaaacattagaaagacaagagagactgccaacttgtattccttgtccgccatcgttgctacatgatgctgaggctacacttgctgtgttgtaacatgaacatttcaatattaccgtgaacttaccgatgttttggcgtcgcactcggg

SEQ ID NO: 357 - DNA, 4453 bp, Zea mays
tactcctcagcgcctcggcaggtgtcgtcgggcccgaccccagcggaggttgaggcgatgaggcgccaggtggagaggaaggtggttatggacgagacgcaggcgcagcggtgccagggctcgtcgtcctcgcaagcaccggcgccgagaccagcaatgcaagataaggcgcccggtccgttggcacccgcagggagcccgttgtcgatcccagcgcagtctccggcgttctttcaggcgcctgcggtacgaccggccatgcaagcgaagccaccgggtcaggtcgcacaggcagcgagttcatcgtcgtcgttcccaatgctcgcgacggctcaggcgcctaggcccgggcgacctgccactgccctgcaagggaagccgccggggcaggtcacacaggcagcgagttcgtcgtcgtcgttcccaatgctcgcgacggttcaggcgcctacgcccgggcgacccgccactgccctgcatgggaagccgccgggtcaggtcgtaccggcagcgatcccatcatcgttcccagcgccggcgccggttcagggctctacgcccgggcgaccggccatgcaagcgaagccgccgggtcatgtcgcaccggcagcgagttcatcggagcgacctctgcaaatgcaagggaaggtgccggatcaaatggcgctttcggcgcctgcaggtacactgcctccagcttcgagcaaggcgatggtgttcccccctcggccggggtacggaaccgtcgggcggaggtgccaggtgcgcgccaaccatgtagaagtcaagctcggggacaaggatatctaccactacgatgtacgtacgcacggcccctatctgtgtcttggtgtgttattcttggcttcagcgccttgcaaatagtaatccaacaaaaccctacatgtttcaagaaaggaaccacaaatatcatcataatttgcatccctaacaagttcaagcggtatatgtttttgtttcgcaggtgacaatcaaaccggaatcgacctcaagggcaagaaatagatggatcatcaaggagctcgttaacttgtacaagcaacacttggacgggcggcggcctgtttatgatggaagaaaaagcttgttcacggcaggtccactgccattccaatccaaagagttcgttctcatgctaacaaaccatgagagaggaaaacaagggtgtgtttgaatcccttaccatccaatcaagctctatgcaatccccattatgtttatatatgtgtgtttatttgacaacttgcagcgagaaagagtataaggtggcaatcaaggatgctgcaagaattgatatgtacagccttaaaatgttcttggctggcaggaatcgggatctgccacaaaacactatccaggctctggatatcgctttgagagaattcccaacttctgagtaatacatccacacactcatgcaaaagctagggcgtgaagtgtgatgcatcatatattcatatttatcagccacttatgaactttatatgaatgttttaaattgtttacttcaactccggtggcaggtatacaccgatctcaaaatcgtttttctcacgaaaggaatttggagatggtcagtctctaggaaatggtgtggaatgctggaggggttactaccagagcctacgccctacacagatgggcttgtcacttaatataggtagagttgtgtcttgtgcagttgtgcctaatgcttcctgcctttattgttttcttttgatgtatatgtattgtaacttttgcattgacctatagctacaaacttgccttgaatcgctttcaaaatgcctgcttctgaattacaaagaatcttttcgtatatttaaagtcccttctatacctttatcaatagatatgctagtttttgttatcatgctaaatgttagtctttgtactgtatgaatacactacaaaatatttgaactccaaagtgtagctagtgcctggttgaacatttttctaacaaactggcacagacagtgcccgtttctaataaagaaggcagcaggccgggttaacaacaacacacatcacgccccatgtcaacaaaactctacaacaccactgtccactacagcaatcaccacacaagccatgtgaagtattttaaccaaccatgcaaagcattttattcacttcaaaatctaatttctgaataaatcaagtaatcaacaatgtgatcagattagcttgtgttattaaagcagtaataatttatagcatatttttcctttttcctgcttactgtaacaatagggttttatgtattttgagttataacacatctctaatctgatgagctccatgcatgttgttaattgtgttattatttattaaagatatgttcgttgttgaaaaccttacttctgattttgatgaaatttatatttcctcacagatgtttcggcaacgtcattttacaaggctcaacctgttattgacttcgtagtggaatatctgaaccttcgtgatacttcaaaacgtatttctgatcaggatcgcataaaagtatggactatatagcatttatcttaccatactcattttattatctgtatgattatttcaccacgcatcatgatgagttcttttttttgcaaaacagctgaagaaagcacttaagatggtctgggttgcaaccaaccatatgcaagataaatgcattcactacaggattacggggctaacctcaactccattaaaggatttgacgtatctattctactatatatcttgttgcattccatttatgcaatcacattatatctttcttattgtgcatacaggtttgatcaagaaggcacaagggtgtcagttgtgcattactttaaacaacgatataactactacttacaatacactcactggccatgccttcaagctggccgtgttgacaagcagatctatttacctatagaggttgcacttttatgtttttttatttgccaattcgataactctaacctttttttggacaactatttgcatgaataaatatatcaacctcctagatatatcaatttattcacatgttattatatcatttatacttatgcaggtttgcagcatagttcagggacaacgctactccagtaagctgaatgagaatcaagtcaggaacatcctgcagtttacctgcgagcgaccagcagataggcaaactagaacttttgaggtggatagtcactaagcctatccgtgatgtcactttgtagtttgtacctttttgtgtatatgttttttattttttcaagttttctttaagtgaatactttgtgtgcattctcaggtattcaagaattacaaatctgatggatcaacttatgcagaagaatttggccttacgttgatggatcaacttaccttggttgatgctcgagtgctcccagctccaagggtaaatgtgtttcttatttttgagtatgaaagaacataagtgttttagttaccatctaacaatcaaacaatatttttagcttaaataccatgattctggaagagagaaggtttgcaacccttccatcggacagtggaacatgattaacaaggtatcatgtcttgttcttctaatcttgtctaccatacttggtttagttgactatttggttggtaatacttgtatattttctagttgcgtcaacaaatgaaacaattatgtaacgactgcaaagaatctattagatctgtagtctctctctatatacacacatgctattcgtcacttacgtgaagcttcaccaaggtataattactgaaagtcgatcaatcattaccataaaatgactgagcgatcttcagtaattatatcttggtgaagtttcacctaggtgacgaatagcgctgccctatatatatatattattttggaatatttggtgaaattttcagagaatggttgatggaggatctatcaaatattgggcatgtataactttcgcctctcgtttgaatctgaatgacgttgtgatgttttgcgaggctcttgttggcatgtgcaataacattggcatggtaagtctatctcgatggcacttctcacaccatcaaatttggtggttaaaagtaaatttacatgtttttgtagcaaatgtgtaccagaccgtgtgtagaaatcaggaaagcacaccaagacaaattagaagccgaaatcaggggtatccattcgcgttctgcgcaagtgcttgctcaacaaggtctaacagcgaaacaactagagttactcatcataattctgcctgatatgagtggtttttatggtaagttgtttaaatcgatcttcaagctgaagattcttcgatattttaattaaccttttccatattaaaatataatttcttgaattttacctaatctgtaggaagaataaaacgagtttgtgaaactgagcttggtttaatcactcagtgctgcgcacctaagaatgtaaggaaag

SEQ ID NO: 358 - DNA, 2421 bp, Zea mays
gcgaagctttttaagtgctatgttactgtctacttcaatatcaggttgaaagaattatgatatcatttcattttccaattaggttggtggccggaacacaatgcttgaagatgctttcaaccggagaataccgcttctgacagattgtccgacaatagtctttggagctgatgttacgcacccatctgctggggaaagttcatctccatctattgcagcagtatggattctctctgggtttcactattttctttgtcttactcttggcttttagttttcatttggacagacacactactaattgaatgtatttgtttttggtagttgtagaatcttgttaatttatttggtttcaatgttatacctccttttgaagtattctttttggacagatctttagtaacatgagtttttaaaatgaaaatgcatgtcatttccaatcttgtgctactaattctttaaaacttctgctgcagatgatgcatgctgtgtttgtgatttaaatgtattctaattcatatccatttaggtggttgcatcaatggattggccacaagttacaaagtacaaatgcttggtgtcttcacaaggtcaaagggttgaaattataaatgacctttatacagaagtggaagatccacagaagggcattgttaaaggtggaatgattaggttagttaagacagattagtattttgtttttttgttgttgtaggaatgctgacatttatgtattgcagagatttgcttatgtcattcttcaagtcaactggccaaaagccttcgaggattatattctatcggtttgtagagatggtttcatacttttacttgtcttttgtttgatacttatatggcagatcttccatttttgcagtgatggtgttagtgaggggcagttcagccaagtcttgctttatgaaatagatgccattcggaaggtcattcctgctgaacctgctttagtcatttccatctcctgcatttgatggctactctacttgacatgcatgttgtttgtgatcgttctgccaggcatgtgcaagtttacaggataattatctcccaagggtcacatttgttgttgtgcaaaagcggcatcatacccgcctgtttcctgaaaatcatcgttcacgagatcaaacagacaggagtggaaacatcctgcctggtatgcaagtcgcatagctgctaggcagcagtaaatattgatatgcgttattatttaaaagtatcaagtcttgtgaacctactttgaagtttcaagtaaaccttgtcatcaggaactgttgttgatacgaagatctgccaccccagcgagtttgatttttacctctgtagccattctggtattaaggtatatatactgcattatgaatcatgcttatcagcctagtccttactgcggattgtcgagtagtaatttgcacaatattaaaatattattcgatttttttggtcttgcacaggggacaagccgcccagctcattatcatgttcttctggacgaaaatggtttcagtgctgatgcactgcagaccttgacttataatctttgctacacgtaagcttcattgatgatgtttcctcaatttgcataaaatatgtaccattttgccatggttgaccttttttttgtcatatttattgatgtcttacttgctcgcaggtatgcccggtgcactcgttcagtctctataggtgagcactaatgcagttattacaaattacagtaactgtttgttcatcagtcaaattttctcttgaattttatgtcttttttcggctttgcttaaaaattgtttccgcttttcgtattgaataacagttcctccggcatactacgcacacttgggtgcgttccgtgcccgttattacattgaggacgacagttctgatcagggctcattgactgtggcaactcagacggatgatcaatctgtcatagtgaagcaactccccaagatcaaggagtatgttcagcagttcatgttctattgctaaagctggagtgtattccaaatagttcctgaaaagcgtgcatgcgacatttttcttggattgatctatgatgtcgtaactgtgaactcactcactcttttgtctgtttcgttccatcatcatgcttaactgattcgaaacggaatccttttgcttttctgaaatgcatggttctggttgctgcattaagatgtctagagcctttgggtctactttgtctgagcggcaggtcgcctccacgctgccttgagcctcgttaaggcccagccgggtaaaatcgtatgcgtggtgcttgttggcagagtagaacctcacagtctggtttatatcctcactgtcggaaacttaaccgatggcaggttagcagtgaactggaaccgtactgttgtggttgcttgaatccgtcagtgttgttaatgc

SEQ ID NO: 359 - DNA, 721 bp, Zea mays
actcgtacatgttgcgtccgcgtagtcggtaacattgattttatttgagtaagatctatcttacatatactgtcgcaaggcatggacacttagccagtgttctttttaacgacatgtctttgttttcgtccgtaatgtcattttatttggaagcgtggggacacgtgacactatttgaataccttgtttaacaaggaggttagaaccgccccgggtacacaactcacttcctcagaggtcggagctggacatgtgagaacctgatgacttgacgaggttccagatcggggtcaagtccacgcccgggtacggactgcgggtcgggactgcgtgagtgaagtttcatggcaggcagcaagagctaggcccagcccagcccagggcccaggcaccttcatcatcagccagagtgcttgacggtacgtgcgacggtgcgaggtcaagtctttgtgaaggtcatataaaaaacctctgcgtctcaacacgcggtccgcatcgcctgcaggctgccacataagtaagctaaagttcacctttcgcgagtgagagcaccggcgatggccaagcccgacaatagcggggactcgtggtcgtgggagtacaggctccgcaagtacctcctgttgctggccatgctggtggccacggtgacgtacggcgcggcattcaacccgccgggcggcgtctggcaggacgccgacccggcactgggccacatcgc

SEQ ID NO: 360 - DNA, 650 bp, Zea mays
cgagaggcactacaccagcctggcgccgctccgcatcctccgcgtcgtcatggtgctggacctgttcagcctcatgggggcctacgccgccggggcgttccgggacaggctcacggccgtctactccctggtcctgctggccggcgtcgtcctctacctcgcggcccagatggcgctggcctggcgggcggacaggaaggacgacagcgcgcccgagcggctccgcaaggtgctcatggtgctcgccacgttcgccgtgagcgtcacgtacgtggccgggctcagcgcgccgggcggcttccgggaccgcgccgagggcgcccaccgcccgggcgacgccgtcctcaggggcggcccccacgacgcgcgcctcaaggcgttcttcgtcttcaacaccaccgccttcgtcgcgtcgctgctcatcatcatcattctcctcgagaagaagctgtcgtacagccagaatgtgcggtcggtcgagctctacgggttcatcgccgtcacgctcatcggcctcgtcggggcatactccgccggcagctgccggcaggttgatactactatatatgttaactctctcattgctgccgtcattgcctgcattctccttcaagcggctgccatgaagttctgcaaaaaggccataatgg

SEQ ID NO: 361 - DNA, 735 bp, Zea mays
tccatcctagaaggacccacccctcaaataaccccaaggcatcgagcccaagggtcagatgaggcagagctagaaggggggcggtcgggcaaactgagaggaagacactcgagtggttacacacctagcctagggactacccctatcataaatgactgaccaaattaaatactcaaggcatcgagtcacgacagagggtcgtccctccttccagttatgacctacgaacctagaccaagagccccactcatgacctatgaagccgaagacctatgactcactcttggctttaccgagcctagtcctaagtctctcgatgatctacaaaacccacaacatggcgaaggacatcgaagcataggctacgaaggacaggggacgatgtggcataggaagagtaatgacgatgcctgggtccaccaccgtccatgcatgtcatcctagccgacttaaagagctcaaccagagagctcaggggatgatggtgaataccgacaagctcaaaggacaagggtgaatactgatcgataggtttctaccaatggtagaacacttcattctaccatgacgcagtaacttgttccataagaagccacttgtaaccgacccctccttagtctataaaaggggagggtcagcccaacgaaagggaggataggtgatagagcatcaatactcagtcgacttagctaggtagcgaacacctgatacgtagtcccttagaaccaacaacac

SEQ ID NO: 362 - DNA, 510 bp, Zea mays
ggagcctcgactttgtcgttaacagtgagggagttatgaccagggccttggtagcccagtccccctcagcaaaagatctggctgacatcactaaggccttcgatgatctggctgacatcactaaggccttcgatggagttaacagtgagggagttatcaccagggcctcggtagcccagtcccctcagcaaatggtggtgcttgttgggatgcgcctatgttgattttgtggggatgatcgaccccgttaaggactcattccatgacctcctcttattgaactcagaatacagactcagctccccatccaacggggcgagtcatgacccggctcaggagtgcttcatggttagcactctaggggctcgctccccacccatggcatgtctcgagaaaaccctcgcctacataacgatgcatgcagcgacatctgcaccgccacgactcgattgaacatacaaaaggttgccctaagagccgagtccttcccgagacaactaatatttctgg

SEQ ID NO: 363 - DNA, 1879 bp, Zea mays
ctgagcaaaacaagatgcctaatttgcagaaggaagaatctagtggtggaaagggtgcagcatctgccgcaggtggtgttcaggagagagtgaaagaccctaaggtgagagagccagtgtcagcgaaagaccctaaagtgatcttagaggttatacatatggtgttcaattagttatgtgtccatatatatatgtatatcttgcagacactgaggaggcttgcacagaatagagaggcagctaggaagagcaggcttaggaagaaggtgagccagtcaccatatgggactgtatattacatgcacaagcacagcatatataacagcatatatagagaaacgatacactgcacaattatgtacagtttttcaaagaaacaaacagtacatttatatggcatatatatatcctccccgccatataaatatatatatcccttattagctatattaatatattctttttatttattcagtacaccatttttaaacctactgctgttttcctaatcgattgaagtctcaagtagtgtcagcaggttggttaaatgaactttaatttgtgatgtaacagtcttttggttctgtccttttggccttacatacatgtgctttaggatacgcgtgtactttttcttcctttctcttgaatttgacaatgcacctaaagaataataatatcacttccaaaaggaactcatgcatgtatttttctgaccctcatgatttcatttctatatgtatagaccttaaagtttgagtgacatacgtaattatttgatatattcgttcgatcattaattgtttcatttctgaatctgggagatattatacaaaaaacagctttttacagctaatggcggagctaaatgaggctatatatagcgggctaccaaaactatgtagtctgagttagtagttcaaaagcttttctgtccttctaaaataatatcttcctttttggcactgaataagtatgctgaaaatgcctttagtctatacatatgtagccaacctttgaatgaatgttttgatcgagctgagtacacccacaaaacgtaccatatggattgatgcatccactcttgtcttactcttcaggcttatatccagcagttagagacaagtaggatcaggctcagccagcttgaacaacaagttcaagtggcaagagtacaggtaccaataattcttctaccagcagtatatatatcttggaagaggcagttatatatatggtttttgctacacacagtagactagtacttataattaaaatgtgactgctactatatataattaatgttcttcagggtgtcttcttgggcactggtgagcagccaggttttccttctgccccttcaccaggtagtagtaataataacgggacactccatttcatctctttgttttttccctaattaacatggatggctaattaacatggatcataataacgatgatcagctgcagtatttgacgtggagtatgggaggtgggttgaagagcacagcaagctgatgttccagctgagggccgcgttgagcgagcacctggcggacgaacagctgcagagcttggtgagcggtggcatggcgcagcacgaggagctgctgagcctgaaaggcgccatggccagggccgacgtcttccacatcttgtctgggctgtgggtatcccctgctgagcgttgcttcctttggttgggaggctttcgcccctcggaggttataaaggtatatacgaatagtttactaattaaatatataacaatacatctagctagctacctgtatattattaactaattggcatggtatagatatatagaaattattataatatgcatataaaggtatactattaattaattaccagta

SEQ ID NO: 364 - DNA, 566 bp, Zea mays
tctatatctagctagttggcgcctgcaaatgagaacgcccagaataatagagatcgtgcatgattgcatgtttgtttgattggttctcatgcatgtccgatccatttaatttgcacatccatatagtatcttcttgtacgctagtcattgtttatggaataagcagctaacccagtagtgtgcacaaccacacatacagagtattgtttagcactaaatcatccaatagagaccaactaatataataatgcgctagaatattagctatgtcttctctatacaaacctggtgataatattgaacactgtaccaattatacacacacacgtaggccgagaggccaagcacataccttgcatatatatgcatggtggtgggaaaagttaaaagttgaggagcaaagacaagacgggtttttggactcatgtattgctaagatgagcaatatcgatcatatcgggggagtaggttaccggatagggacaagagtgcaagatatgttactcactttgttttaaagtacatgatatttttatttacttttgaatctcgtttgactatttgtc

SEQ ID NO: 365 - DNA, 1743 bp, Zea mays
acttctcgattaagttacatagttagccttgcctctggcgaccaggtttcgctgcaacgcctatgtgacaacttaaaaaaccatggcactttttatcttagttacagcttataccacactgaatgcattgctatttcactggcatgattgcatatgctgaatggatgcttattaaagcatgtataccaaggaaaacttgctgaataaagctggcagattttccatttgttgtaatctcctcgtgtgacttcattgtgaagggtgattttatgagttgaatattttcatgttaattgacgacaagtggacatcaatgattgaaacccgataatcccaaatagggaatattagctgcagatatattggttcttaacagcagctttgtgtatgctaagaaaatatgtgagatatttttagtgcttcaggccaaaggcttggcctggcttttttgtacaaacagatctgctgggcataccagcttgacagaaacatggtctttctttagtaagttttttgaaccatacatcattgagaagattctcagtaagtctaaaccacaactctagtaaccaccaagcaagaaaaaggagcattgacaagcacaaagacgacaaagtttacaccatattgttaaggataacaccagcccacggtcataaagaatctaagtataaaagtgcactgctggtaagaagccagttgaacaacaattttagagttccagtgcattccttgtcaatttgcgcactgaagtgccattaagatggcactagtacagcaataacatagttgtgtggtaacccatctagatgtgatatggactgcaagctgagtgccaaactgtatcacataggaatactatgaatgactacagaatacactgaagacattgcagtctgatatttagatgaagcattcactagatttctgtcagaaaaacaataccaagaaaaggctaaagacatcattgtcaggtttgcatcatattgtgtttgtgaaaaagaatattagtcaaaatgcaaaatataattcgttacaaccatatatagtactccaacattagccttccttttgccagcatacaagttcctttatttattttgtgtttctttgcatttatggtagtttctttcaaaacatatttatgtgtttgtttgcatatatgtagactcaggtataggtacaaccaatcttttgaataaagcataccaagataaacactaggtaactctttgttttatcaatgaaaggagctatgttatagtacatacatggtgatgctaaaacttagtatattaagttcacatctcttatttatttgcagatattagtgttttcaaatcactcgattaatcatgtttaaccaaaggtaaatcaataaattggtcctgaagaaggattaggtgcatctattagattatattgcctagtaaatcaatcagttagcaaatgattaactatagtcacgactcacgactagtcggcctttctagttgaatgactagttggtagaaatggcaacttgggctaaagcccagtagcattcaaagtccagcacataccatcatcacctatatatactactgtcactcatgctcctccaattgtgacctagccgccacctgaaccccagccgccacttgaaacggccacaagctagagaggaccatgtctgtgtcatactgtcgtgtgtgtgcgctgctggcttgctctcaagagcgcgtccctctggcaagcatcgag

SEQ ID NO: 366 - DNA, 2097 bp, Zea mays
gtaagttgaacaagcaagtaatcacaatttctgttgcctcacttatgttgtattttctttggataagattggttctgagcggttcgacaaggaatatgcctatagcatcagacataattatggaaaagaaggaaaacggacagtaagtccctcctccatgtgtaacttgaaattgcaacggaattattacttactctcacacatgctactccaggattacactccatattcatgccaaaatatcatatctgcaacacctggtgttggagatcaccatggatgcccgtttcgacattttgggtacaatttcacccttagttttctatagatgggtactatgcgcttattatttagataggtgctctgaactttctgttagcaatatcagtttgcatttctgatccttttttcactagattactcctgaactttgagggggaagtaagatcacatttggaaactagaaaatctgaatggagcaagaggcctccaacttctagttttttctgattaaaaatgacacccaacaaaaaaagcttaatgtaccaaaaagaagtcatgcagttatgaatgagaagttaatgttttgtttactcatttggtacccaagttgaaccaaatagtacaatactaaactaccaagcagagaaatgagacattttgtcctatcctgccaatatggtttcatctagtctcatccatacttttctattgtatagttttaatttctttctcgattatggtcaacagcttctgttgtgatgtcacttggcatgtcagtttgtgatgtttcaagataaacatgattctaccttgctttgtacctgctgtttgctccaagcatttgcttctgctttactgtatctgcagcgaagaaaatttgcgggcagcactcaacaaaatgggcgttggtgggcatgcattggaagagataatagataaagtgaagaacaggcattaccaggtgctgtgcttcattgccatgggcttaaccgagcaatatgatacccttgaactgactggtttatctgtcataatgaattaattatacagctagcttgcacattaacatttgagaccacacacggtgtctcctgtgattctggaatcaaccatccaaaccaatatttcagtgaaagccagaaagttctgcgggccaaagtgagtgcagtggtttattatacacttgacatttgttcttacgttctgctggttctgtcaacatgagtcactgttccaatttaacatgtgtggctcaatgcacagaaccagaaaatggagagccaatcagcaacctaaattgtattgcagctggagaaactatgcatcttcaaaaatcttaccaggtcttgactccacccagcttttgctctacattttctctatgttaaccacaacttgttcatgatttgatgcttttctaatgtgcaatgatggacacaagacatgctgcgctccattttctgtttatggcatatgtggtttatacctctgctgaattttcttttgactgccatcttaattcctgctgaatttatacctctgctgagttacactggttaggccgttcaagtcctggggccaaagaaacccggtcaccatgttcaaagcctggcattcttcttaatgccagcatctttcccccttatctggtttcttttaattcccttctcacttccagcagtttcattagatattttctttcccttgttttattggaaccatgtcacatccattcgacaaaattcattttttgaatgatttaaaatgccccagaatagtgtattatttattttatgtatgatatttttgttttgccccatccaaggttgccctttattactggatttgcttatattattcatacagctctgaagtttaaggaggcttttgttaaatgtgtgcgaccttgtgaccgtcagtttttaactgatttgctggttaaaagtgtcatttctgtacatccattttttttatcaaacatgtgatttggtgcagcacgtgagattcatcaccacaattttcattcataaactcccaaattttatacacaagatactataagcccactaataatcttttggtcatgcagcaggt

SEQ ID NO: 367 - DNA, 830 bp, Zea mays
tccttgaagccaattatgttatcattactgattgttgaccattggcgtctacctggaatattgttgcttcctgctgttaccaaattccagctgctggcttggcctaaaaagaccaggctccagctgttagctgccatgccctacccaagtgatggcaccacactgtacactagaagtagaagtgttatctagtgctgcgaacagcagcaggtcaaatgcgtgtgtacatgtaattctccgaagaaccaagagtgaacattctgaatttgatgggatcagctgtgctgttatgttattgccaagatctttgggtagaatagagttctttacttctgattatgcccatgtattctttttaagtgactataaaagctttgctgtaattctattagaagaaaaaaagataggttggtctagttagggctagtttggaaaattaaaccctaaggaaaaaattaaactaattttcctctcaatccttgtaatcctgggggatttaagtttctagaaatttggacctaaaaatttgacaattcaacaaacaactaaacacaacataacacgttaccaatcaactagacaagacaactaaatgcatgcaagtggtgagcaaaatcaaaattgcacttgtggcaaagttttgcacgaaaatgagtgacatctgggaacaactgctgagaaagtgtggcgcaccatagctatgacattgaatcaaaaagttatgacagcgaatcgatggcggcacaatggatccgatggagagaagggtagcgaacggagggtagggagggggatgataggaactttcagggcttgtttgggagtaaagg

SEQ ID NO: 368 - DNA, 2484 bp, Zea mays
aggtcgagtttatagactagtgttattttggcaacatgtggtttcactagtgatgataaaagatatattagcacccgaagtttagaagtcagacaggatgcagcctgaacatcatcctcttgtgattggtggggtaatttgacacaaatgtaaaatgcatctttcagcatataaaaaatatttcagagcaagtgcaaactagaagggcagaaaaaaaagtctggtacacatagcagtttccaaggcaaagggatgatgactacctattgaaaaaaatcattttatttgcagagtttgatgtcacaaattccattttttccagagtatggtgcttcaaacaatgaagtttatattagtatacttaagtcgcagttctgttagtttcattcccaaatagacatcattgttttggattctggaacagtatgctgaaagtgaaaccttgagttgcttgcaaccatatttcctatttataggcaaagcgttgtacggtacactggctgtactaaagtggggcaatcagtgccttgaaaattgaggacatcagataaggggcaccatttgactgtagtgatgcactccatatttgcaatgtccacgcaaaatgcttttaggtaatggtcacaaatgtacgcaaagattggctatgccctcttcactatcaaatggcatcaatcgcagtaaaatactttgaggtagcctacatctgggaaccagacaacaaaagatgcctatctatgaatgcaattgttaaacaaataccatggatcttgaaatcagcataagcatgtatagtaattattaagtagcggcaggaccactttaactttcgtgtagtttattcaattggaccccatccctatgcccttgtcactatattttcagcataaagtggaaccatgtctaatagctaaatgatgtgggcataatatccaaactcttttcaccaatggttaaatactttgaaacaacctagtccaataatttattcattagaagcacaaccacaatcacaagaaaattaaaacaaagacacggaaggccggaaccttgagttgagagtaattaaagggaaatcgtactcccaagtaagtttgattaaggataagaagggtttgctcaccgattccctgatggccttggtgagctgcctcctcgccctcttgatcttcttgtccaacgcctgggcctcgttgtcatcaatgcggggtagcaccctctccagcaccgccgggtcaagaagggccatcgactcatcgacgaggtgaggatacaattcgcgcatctcatctaaagtcttggccttgtgccccagcgcgtcattgatggattaatgcccggcgttcttcacttgggcggcgcccttgctagattgctcgccgccgccggcgcagcagggcgcggcgagggtctctgggacgcgagcctcgtcgtcggggcggcacgcgcgcccgaatagcacgagcttcttcttggatgacggctctgtggcatccgaggccttggctggcgttgactcgggcggcggcgtcttcctctttttgcgctcgggtggcgcctcgtggcccttggtggacagcgccgtccggctcgtgaacgccctcttcgccgcggacgacggcttcgtgctggtgctatgctctggcgatagggcctgcggcggcggcggcggcctcatggcggtaacggcgtgttgtgattttgcacttgcagcgtgggagagggagcgaggagtggagattttcaggaggtcacctttttgctgctttaccctcatcaaatgagagcttcgacagattaccctcgtgcaaaactgataatggagttggacaaactgatcattttgagtctttgctatacagacagctcgcaatgttgcttgggcagcccactggtgatgcatctccaggaaagagtactccaacaaataataaaaggactaccaagaaattgacacagagtaagaaggaaaaaattagcacctaactgtttgtccacctatgtatcaacttgatgtcttgatttatgaacaagatgtcagctatgtatgaacttcctcacagtagtgtttaccaaattagcacctaattgtgtgaatctggaattgtctttgatccaaattggtgaggtttgctgtaaagttgtctgcatgttttagaattacaggtgcttcactagaaattacaagtgatgcgttttggtaaacactactcaaaagtgctgtaaagttgctgctgtggggaagagccagccagccaggcacggcgtccgggtagcagacgtcggcaaggatgtagacgtccgggcagcagacgtccacggtggattaactgagaaacgaaaaagaaagcattcagtaaatgaaacatcccctcgcggtgactgttgacctctgactgccagagggcgctgccggccggccaatacacatatatgcccattaatatttatgttcttaactaagtttatactatattatataat

SEQ ID NO: 369 - DNA, 1768 bp, Zea mays
ctacgcgtgtgtgcatctacattttttatttttttgcatagcaagtctagtttcatttctctccctctatatgtcactacagtttaatttttagccatagtttaggagttgatccaacgatcatccaaaacatgtggaacttacatgatgaggtatctacaagatatagttaattaaccgaaaagtctatgattacaaattgaaggtgtcttggttacatttcttttgatatgcttggttcccttgaaaattctatcgtcgcaaacgtaggtatttttagttttgcttaaaaaaaggtgttttagttgataagattccttttttgatgtttgggaacggtcgaacggatcacgtgcaaactaagcacttggtgtaaaaccatgcaaaccaacatgtagttggaggtggagggggtatttagaaatataacaggggaggtggaagggttgttttgacagctgatgcacggtgggagggttattttgtaatttttccatgactccttgcacgatttgcacgaagtgcttggtttgcacctgatatattgccttgatgtttatctattttccactagtctagggcaaacatctcattatattgtttcacttctaactttcttatgttccatgataatcgaactaattttatgttctagatatgaaagtagtttttataaacttagtcaaacttttagtattttacttaaaaagaaagtaagttactaataaataagtaatagaaagtttttaacttctacatgcaaacccttgttggatcgtaataccccatttgaatcacaattatcgtctagtttcttctttctaataatgaagggttctacaaaacttgtttcaccgtggtcttagctaggtttcctttgtacaaagcaaagcaaatgagaatatggtataagagtttaggtctcatgttaactttcctaacaagcatgtggctagacttgtggaaaatttccattgcgtcatctatgcctccacttaattcatgtgttgtgcacataaaaaagcgacaactataatcctatgtatttttttcataagaatcatgtattacaatggaaccaacttttaagttgacataggaactagggttagaactccttcaacaaggacaacaatgcctatattgaagcaatagcaaatcaatcatatgtcctagagtcatgaatgataacaacttatggtcaggttttgtgaacttatggtcttttggtatctattttgtttgaccttttataaatggaaggaatatatgaaggaaagtatcattcatgaggtgtagcaatatgatatgttgctatatgtttttagctatctcaacaaatttcaacatcttaagaaagtttgtagaagttaaacaaatatacttcaccatatgaaaaagtaaataaaaaattgtagcttgcttaatcaacatttgtcatgtacttgtgcacatgtttgctcacacaaaaaagaaacccacacatactcacacaaacctttaatagttcgttgacatatgttaatagttatgtacatttttcaggtacataaaccttaataattatgtagtcttgaatagttccactagacaaattaaacattaatatacagtttttagctaccctgagtccacatgttaataattatgtagctagatcttttgatgatcacgatatatcagctagaatttattttggtaattgctctaggcatgaaaatcatattcaaaaggctgatgaaaaataatatttgtgctcatagtttta

SEQ ID NO: 370 - DNA, 502 bp, Zea mays
tctctattatgcctcttattggttggatgtatatgagttgcgctctcttacatttgttggtgcatggtccactatcaactacagctctaatacaaagaagatgtgtgatgcagcaaagttggagtctttgctttattttgatgtcaacatgtttacacttctcttagatttctccacaagtccatcagatcctcgtattaccatggaggattccacaactgaaatgtatgaggcagtgcggctgtttgaggctactgtaatgttgacattctgttcaggaggtaaagcacttggaataatgggcatacagtatttggatgcatatagagaaaagcaggttgccaagttgaacactgataacttggttgccaatgtcaaaaaaccatatctcctacttgagctcggaatggttcatacagaccaggtgatcgataacctacacaacaagggtcaggaagcaaaaattttagaagccttagtagcatacatatacaggtccaat

SEQ ID NO: 371 - DNA, 888 bp, Zea mays
tcgacttggtctagcaagtcgtccgacttgtccccagttcggcccaagcaacagactaaagtaaccattgtacaaaatttcatatcgacttatcggcatatcattgtacaaaatgctaaaaggaaccatatcggcccaaccattgtagctactagtttcattgtacaaaatgctaaaaggaaccatattggcatatcatatatccagatttaagtaatagaactaatataatacttaactttttagaatcatataaactgattacccagggcatactgcctatatgaattcagtattgtaccttctcaagcaatgtagagttcagagtgtttccaactatccacagaacacgtgaaagaatttcatcaggtaaaagagcttcagcccaagaaacagacacactggtacgtaaaacagcagccaaaaacctgtcatagaaaaatactacattgactatggctacagcaactttcagtgaaaatacttgttccatctcacattcacttggcatactacaaaagtacagcaatacaatatcaagcgacaatgaaaagcacaagcacaaggataaaaagggcacaaaagaccaataacattttgcataaattatgaattcactgttttttcctattcttctctttccagattgacatgatcaattagatatatggttgtccagtatagaacataaaacataatccaaattttcttacactaacaaagtaaatatagctacatgtttaccaaaaggacagtcggctcaaacaattttgtatcttcaattcagcaaatgacagttgaatgtaactgtatgtcgccacagagcaaatgccacaaacatgactagttttgagtgaggccatttgcatactgctatgatacaaccaa

SEQ ID NO: 372 - DNA, 2736 bp, Zea mays
cattgcacaaactgattgtaaaggaaacatgaaacaatgtgaatagtacttatgagtctgaaattctgataacaatggctgcattgagattctagatctctttcacatgatttttccaagaccacagaccttagagcgctaaaataatggtggtgcatcaaataatctagtgatatacagtgagtcaatataggaaaagggaaagaattaacagtgtacaagttttgttatagcaaattagatatcaagaagacaactcatggtaatcataactagataaaatctacatcatagtattgaaaacacaacctgaatacttcagaaaggcaagcagagtcgtctagaaatagctgatccataaccgtagcagtcaaaccattgtgcaggctgataacatttactagagattcatgacaggctaggtttcccaggattccaagacagatttcctgtagggataagatatccgatgtacagctgagataatggttgtcgaaaatgtggagcagtgaggggcaagaattagaaaaaggcaagtgttacttcacctttactctagaggattgagtcacatggagatttgccaaaagcacttcaagcacaagattgttcatctacaagaattaaggatatgcattgtcagcactcagcaacactggatccacttacactacaagcctacatgtgtcctcaataacaaaaataaaagtgaaagaaattttagaaatcattagaattgacttcaatatgccaaccgacatctaataaacttcttctgcagttttaaaaattgaatattattactataaaaatggctagatgtatgcatgagtagaatatttattaaaaccattcaactagattgatgtggaagaataatgtatggtggataactttcaacagtaccagctatctattggacaaggtgcaactcttgttattcaaatgttggtcaataccagcattttctgaaaatataagtattttcattttgtagagtttcaacttttcttttggacaaaatagttccaactttaaagcatattctcctggtatttataatttatatagctcgcaagagcatctgctaaatttgtagaacacatggacttagctcacacccaaggacttcatctacctccactaatgagtattaagaggtaatatgaactcacctcatcattcccttggggcaaagaaaaggagtctgaagtagctacgttacttaaaagggcatttgatttctcaagttttgtgcaacgatctaacaacaatacaacattatatattaaaatcccaaacagccatacgatacttatattgaaatcttagtgcaaggtctttgtttttttctacaccttttcttttgcaaagaaagcatatatgagctagaaagctgggtatagcactatagcatagcaatctacattgtaaaatagagtaagaagatactgataacacaccatcagttctgcttgtggtttactagctgcaaggtcccacagaatgcaaccacactcttcccatggatccttataatcaggttgcgctgattccccattaccagaatttgcatccttctcgtccggggcacattgcttcacactgtttagtatcatggagtcatctcgtttgctaacatacaatttcaacctctaaacacgtcgcttacctgaactctttctccacattggaaccctggggtagtagctgccgtataagggagatagtgtagctgggatcaactgttgtcgtgtcatcaagcagctacagaaaatcacaagcatgagatctagcatcagcagggcagcagacagccagccaaacacttccttccaagacgccaactgctcgaaggaatggcagtgaggcggagactccaaggcgacatcagaagtggtgggactgggatgtgagcagtagacataaggaagagggccacgcacctcggaagatggcgcgaacgggaggtgagtgggagcttcctcgtcgtcgtcggcctcctcgacgccgccatcctcttctctctgactcgcttcttcccgttcctgcggtgactcgggcgcttcgtcctgcgccgcttcgcccccctcgagggcatactctcgcggagcgcctggcgccattgcgacgtgaccggcggagattagcgagtacctgagtattggccggcggaggcgcggagcttgaactacaggacgctttcgagtttcgagggcgctgcagaaggggaaccctgaaggcctgaactgagggcaggtttcgtgcggatgcgcattggggattccggcattccgtgttcaggcagcccatcctactcagactcagagcgagttcctcttgatgggcttacgtgatccagtctagtaaaagaaagaaaaggaaatggcgaatttacggcccgagagcggtccagcccaaacacagttctggacacacgaacatcggaacattcgcaagattggtgacccagtgtcacccgaaaccctgcggcggcgaccggctgtccggtgaccggtggccatggactataccctcgcggcgctgaagatcttcggctcccagctcgccagttgcaccgaggcgccgtgctctgagggttgctctgccgcgcagatgctctccggcatccgcttccagcgcgcctgggtccaggtccccaaattaacctcgtctctctccttcctctcccaccttcattttgtttatcgtagcctgaggatttgcagcggcagt

SEQ ID NO: 373 - DNA, 522 bp, Zea mays
atccttctacgtacaatggatagagggaagcctctccccaaggagtagctatagtactcctagaatcatcatgatgctggagctcttgctcttgcgcctttcatcacaaacaggaatatttctcatgcttccacctgtaatccagtacctctgacaactcttgcaaaaatatttggtagcttaatgttgtagttgttgtactaacaaaactttgtatctatggattccaatttggaggtcctgagggttatgtgaagatagaggattttctctagctccttcaggaccttcgctccactcgggacataacccgacctacaaattagactctgatatggatatttcatcattgctggttgtttgattttcacactcatcactgaaattgttaaggctagaactatttgcctgaccaccatataattcccgatatgtgcattgcttttcccacagacactcatgtcccctctatcttcacatacaccatgacaaatataagaagactaagtaaaacaaatgtat

SEQ ID NO: 374 - DNA, 631 bp, Zea mays
taagaatcggaggaggtgtgtgtatttactgggtgctaattgctataaaaaaagtttaaaggccctgtcatcttacttgtcgaaaggcctttaaaattatagagacggtcctataggcgttaatcctaattttgctaatacgtcggaaagttactccacgacgaggttagcgatgggctaaagaatgcatgcagaagctgggcttgatgtaaaagactagtatatggtcgtttcctttcaatttcaacttccaagcgagcgccatccggacggatgtgagctggcctacctaccctaccgagaagccgacacttccctattcccaaaaaacgctgctttcggccactagaaaggttgcaaaatgggcgcaggcagaggtcgtcttggaagtgatgtactcttaacttttaccttgcaccgagcgatagttgtctttctaatcaatacgatcgccaactcgctattaaaacgctgctcttagagcaaacataataagggggttataagctaactaaatgctcaagtggaggagaaaaaataggagagagatatataagagaagcagactataaacttatggcttcgacataataacaaagacgttttgtatgagagacaagtgacgttctgt

SEQ ID NO: 375 - DNA, 2837 bp, Zea mays
taaactaaataacaggctacaaagatccttttacggccaacaattaactctattattaaatttgctcttaaatgaagtctatattgcaaattactactcgggttaggtactagagagtggcatgcatgcatccgattgatgggtgacgataggcacgtaagtatttctcgtacgtacgccgctgcgtcagtacgtgtgtagaatgtagataggtatatagtagtgcgtgtatttctcctgcggagtgtgcatgaatatctggtttgcctacagtacagcaaatacagtcagaaagctctaccaagctggctagcaatgcaagatccatcggctgaacctgaccggcagccggctactttcaaatgggagcgcgtctgccgccgggcctccatgccggtcaccaagagtgaacagacaacgagcatgacatggttggagagccacgaacaacgcgcaagtacagatgttcaccctacccatatgcacccatcatatccatgcatgcatgcacggttctcaatcacaggagtcagtcagtacgtcaggagatcctcaaaacataatcaaatgcacaacatcgtctattatatatattggtcatggacttaacaacactgtaagcacgcatgccatcgagcaaccttgacggccccctagttgcatcaagtacaaaattggtagccaccggctaatataccctctcgggggtacccacgatcgaggagagcctgtgtctacctggtcttgcaacaggggctggttgctaccggcagcagctagctttgcgttcctttgcttcccccagccagcttcctccctctcaagtctcgtcaaaacactgcaggggagatgcatggccctagctggaaaaaggccatccatccctctcagggcaaccaaccaaccaaccactaaccagcaccgccaacctctctgtctctctctcactctcactctctacataggattacacttaagcaatgttgctaacaacactgctaactaagggtggtagtaataaacgacataattaacaggcaggacacacacacatatatatatatatagcggcaaggcgacgtgacggcggtggagtccgtccgacatctgtgcatgcaggtccgttacgcgagcggcgccctatggggcgcgcccttccgcctgttgccgagcgagaggacgatctgagggaagaaccctcctccgcccccgccgctcttcttcttcctcgtcgggacgtcgacgtcgcgccgcgcgtggttcctggccgagccgccgttgctggatcctccgctggcgctggcgctgcccccgtgctcgacggggtcttcgaggatggagctgggcgtggcctgcccgtactgcccggggtcgtcgtcgaagcggaggttctcgaagcgcgggaagccgcagcccaggtccggcggcccgcccggcacgtacaggaggatgttggacaggtccccgccctgcatcatcacatggtccacctgcatgcgtgcgtgcgtgcagcccacagctgggtttagcgtacagtaaccacggaaacggggccgtatctaatctaagcgtgcatgggcgtgcgtgtgcatgcaaacgtactactgcgagtgaagcgacgtacggctgattaataacttactaacgtacgtgccaggcgactgattatggcacgcacgcacgcacgcttgaataatccgtcaaccgatcacgctgctagcttagcagctgtcgcgtgcatgtgcatatgtagaagatttttggtggcacgcgtgtagtcttgtatgggtggtggtggtggtatacagtagtagtagcagcagcagaatagcactgtgtaccttgcaggagaggcagcagaagtggaagggctcctggaggatcctgtcacaggccaagcagacgttgccagagcccttgaagggcctggactgcggccgcggcttgaggaagatcaccttggcactgttgatcgtgtagggctgcatgcgtgcatgagaacgacgatgggtcaggatttttaataattcaaaacgattcggagcacgccgcggcgccgtccgtccgtccggtcaccaccgctgcatgctactatccccctttagctagccgccgccggcagcagaaacagtagctggtacgtgacggtccgcgcatcacctggacgaaggagcagtcgatgagcctctcgaggtcgtcaaggcgcaccacgtcattgtacacgtacctccgcacctggcccaacaagtcgagcacacagtcacacacagacaacactacgatcattagtaacatcgttatacaataaatactacggtacagcccgtcacagtacatatacgctgcgtaaaatgatgggtaaatcgaatttacccgttcttcctgcgtgcatgtgaacgtgctgtgctgtgcgctgcgcaacttataacgtgagcaacgcggtgcgtgcgcggtaataattccagcgggaagggaagtggggggtggggggcgggaaacaggcctgggcgtctgacgagcccgctaggctagtcaccggtaataattgcgacgctttgaccggcggctcgtcgccatcctttccgcgggagaccaagagggcgcctccgtgcactgtggccgcagcgaccgaaacgcccctgtccccggggaaaatccaggcgtcgcctcgagggcacaacggtcaggaagcaccgcaggccggattattttaaccccgcggtaaaaacaaataaacaggcaaggaacggacgggtggtgggctggtgcgagagtggcaatgagcgccggctcgatcgctgggttggtcactcgaagagagagagagaggagggggg

SEQ ID NO: 376 - DNA, 1913 bp, Zea mays
tttgtgatgggctaactaccttatcgctgtagactttgtctgtcactaaaatcattctgtgtgtgaagttcaacctttgttaaggaggcatattggtctgtattgctgaacgacattagcgtccatgacttaagggataggagttattaccccaaagtcaagctgaatatatagcgatattttgtattttgcggatcaaattgaattcattttgtatttttctaattttgtctgaatatatagcgatattatttagtcatcacctaggtcatctttgcggatcaaattgttatactttgtgtcattatgaactcctaggcccagtttcgaatcacgagtctcttgctgcttcggccactttgtcttttttgcctaatgctggaatccttcccagctccattataacacatgctccaagtcttgcattatctttatgggactgtgtcatgtcacttgttgcttgttcttccatcattctacacttcacagctttattcatattgtgatgctacttgggctattgattcctctaatgattattgtgtttttaatgattattttattgcttggtagactaagtagacaacactttcttgttcaagtgcatagggtgatttgcatgctatgactattgtgatggctaaggtgatttgtgttgattgcttgtagatttatgtgtttctatataggtgctataagtatcgtacgtcctccatgagcgtagtaacaaagtgaggttggtgaatgactaatgtttgccatgtggccaaatcatacttaagaatttaacctctctaaatcaaccaagaagaagagtctgttccccacatttatgccttggccatcttccaataaagaagaatttcaaataatcgaccttacaacatgataaagatgattaacaggtgagacaagtccattttgggattgttgtgtttttctttgctagtggacgtacccgaccaagaacatttctcctcatacccaccaatagttttaatttcctcaaagggtcatctttagtatcagagaactggcaattagaatagcgtttgtggtgaattttatctattcttcctaatcgttcatcttccctatcaatgtcaactaaatcatacacaatcactaggtagcactcaataccacaagagaagagagcaactcacgctcatgacaaactctacccatgaattatttttctaagctctagtaaacgaaagcacatcaccacatgattttttttagaggaacatgtccacaatattaagaaactaatattacatgttatggaaaagtcttgaataatggaagaaaccgctttctatagtaaaggtgaaataaaagattaaagatgataagaggcatggtgaagtctaaagctacccatgattctataaagccaaatacaccagcataaaggatctaggtgacaacgagagtaaatatgattgtattgtgtggaataggtcaatacaaaccacatgtgtcataccttgttcgatacacattgaacaactaaaaataacatatattacattagcatgtatggacaaatttggggttagtaagaaaaaatacaatttctagcttctcagctgattatggtatacaacacgaccaacataaaattacactaggaaaaaaaggtaagattagaggagccatcacagagcatgtgaaccctactagtatgaacaatataaattttggtacttctttctagtagggaagcgagggaaaagattttgtgtcttctcttgttctcgaaacatatttctttataaagttacaaatcagctaaaaagatacaaacgtttagatgacaagttagcccatcataaggtcagaacattgttgatgatacgtaactttataaggaaaaatgttttgaggagagaagatagagaatcatg

SEQ ID NO: 377 - DNA, 2497 bp, Zea mays
gacaacttgtccactgttcatgtcaattaaatattgcacaatcccaaggtagcagtcaatattataggacaagagagcaactcactctcaccacaaactatatccatcaattattttctatgttttagtaaacctagacacatatccacatgatttttttttggagaggaccatctcgatattatattaatgaattaatattatctgtgctggagaagtcttgaataatggaagaagtcgctttctgcagtaaaggtgaattaaaagagtaaaatgaaaagagacatggtgaagtctgtagctaaccatgattctttaaggccaaatacaccgacatagatgatttgggtgagcccgagagagaatataattgtgttgtgtgcaattggccaataaaaatcacctatgacatcccttatttgatacacgtacacatattacattagcatgtaaggtcaaatttagggcaagtaagaaaaaaaaaataaagtttctagcttctcatctgattatggtatacaacacgacccacttaaaagtacaccaggagaaaaggtaagatcatatgagtcaacacagagcatgtgaagcctagtagtccgaacaatagaacttttgacacttctttcgggtagagaaatgtgggaacagattatatattttctatccttaaaacatgtttccttataatgttacatatcatctgaaagggctgtaaaagtttagacaacaaactggcccacctcctcaaaacatgattctctatcttctctcctcaaaacatttttccttataaagttacgtatcatcaacaatgttctgaccttatgatgggctaacttgtcatctaaacttttgtatctttttagctgatttgtaactttataaagaaatatgtttcgagaacaagagaagacacaaaatcttttccctcgcttccctactagaaagaagtaccaaaatttatattgttcatactagtagggttcacatgctctgtgatggctcctctaatcttacctttttttcctagtgtaattttatgttggtcgtgttgtataccataatcagctgagaagctagaaattgtattttttcttactaaccccaaatttgtccatacatgctaatgtaatatatgttatttttagttgttcaatgtgtatcgaacaaggtatgacacatgtggtttgtattgacctattccacacaatacaatcatatttactctcgttgtcacctagatcctttatgctggtgtatttggctttatagaatcatgggtagctttagacttcaccatgcctcttatcatctttaatcttttatttcacctttactatagaaagcggtttcttccattattcaagacttttccataacatgtaatattagtttcttaatattgtggacatgttcctctaaaaaaaatcatgtggtgatgtgctttcgtttactagagcttagaaaaataattcatgggtagagtttgtcatgagcgtgagttgctctcttctcttgtggtattgagtgctacctagtgattgtgtatgatttagttgacattgatagggaagatgaacgattaggaagaatagataaaattcaccacaaacgctattctaattgccagttctctgatactaaagatgaccctttgaggaaattaaaactattggtgggtatgaggagaaatgttcttggtcgggtacgtccactagcaaagaaaaacacaacaatcccaaaatggacttgtctcacctgttaatcatctttatcatgttgtaaggtcgattatttgaaattcttctttattggaagatggccaaggcataaatgtggggaacagactcttcttcttggttgatttagagaggttaaattcttaagtatgatttggccacatggcaaacattagtcattcaccaacctcactttgttactacgctcatggaggacgtacgatacttatagcacctatatagaaacacataaatctacaagcaatcaacacaaatcaccttagccatcacaatagtcatagcatgcaaatcaccctatgcacttgaacaagaaagtgttgtctacttagtctaccaagcaataaaataatcattaaaaacacaataatcattagaggaatcaatagcccaagtagcatcacaatatgaataaagctgtgaagtgtagaatgatggaagaacaagcaacaagtgacatgacacagtcccataaagataatgcaagacatggagcatgtgttataatggagctgggaaggattccagcattaggcaaaaaagacaaagtggccgaagcagcaagagactcgtgattcgaaactgggcctaggagttcataatgacacaaagtataacaatttgatccgcaaagatgacctaggtgatgactaaataatatcgctatatattcagacaaaattagaaaaatacaaaatgaattcaatttgatccgcaaaatacaaaatatcgctata

SEQ ID NO: 378 - DNA, 1427 bp, Zea mays
gtccatggcttgggtgtgacagtcacggtgattctagacccagaagaatgtagtttacttagaatttatgctgagttgtggttgtatggtggtcaatttatgattgatttttcttttttacgggtgctggaattaggtgtattttaagtggtcaatgggttattgagttggtgggtataaacagtattttatatttggcataaacagtcacatttatcttagctgcaaatggagttatatgcaaccttccatgtcatatctaacattatcataccgactcttctccatgctatgtgcaatatttctgacctttatgatgtatgcatgctttttatgaaaatgctgggtgcaatatttctgaccttttatttgtgcatgcttatgaaaaaggttccgtatatagctaagcagcatgtatgcttgtaatctaagttaagattagacatatagtttgctcattgcaatttagtcacagtttcatagtcaaggtgttctcattacagatagttgttaaaagtcaaatccttgctggtggccgagggctgggaactttcaaaagtgggctgcaaggaggtgtccatattgttaaggctgaggaagctgaaagcattgcacgtaagtgtactatagcaattacttgaattcaatatgtattgctggcatgctgtgatttgatgaaggaaaaaaaaactatagcagttcttcctagattttcttagatttctttcccgtcaactgttgctatttgcaataatgaaacttatttgtcattgcaatttgcattcccttgtttatgattaaagccaaaaaataaaaaaacatagaaggccaattttactttctatgaactggaaggacaagcacatacttaatttctgttctcatacattaattttattttgaattgatgggtgctgaaatttgctaccatgaaactctacttgtacgatgaagtgcgcatgattactttcttgtttaactaggtggatctgtatcaggaatattgctacgtggataaatctctgtgttcacacatttattccagaatttaagattgtttattcattgtgattggttgattggtttcatgcaagtcagtcatgtttcgggtatgtattttaatctctgatgagtcctactgatactgcaggtaaaatgttaggccagattctggtaacgaaacaaactggtccggagggaaagattgtgagcaaggttagaacttactaattgaggccatcttttgcttttattatatgtttctgtttgaaccgtgattggcttcatgtttgctctcagtctgttggtgtgtttacctgttagttcatttactctctgtagaatttgatatgctatttcttcgttcttggtctgtttgtgtttgtacccattactttcctttacgtcgagctgttaagaacattaca

SEQ ID NO: 379 - DNA, 823 bp, Zea mays
ttctgtacttgagttagtatgtcaataataggaaattcgtactcttatatgagaacacaaagtatcacatgcatccattttctcttcattctccattcttatgttcatgtgaaacagtaacagcaggattgcaccacattgtcataaaaaagtactccctctaatagtaaatatggtaattttacataaagtaggtaattcattttctcttcattctccgttcccatcaaagtttaagtttaactatgaccagtaatacataaagtaggtagattgacaacatgacttccatgttacgagatttttcatgtaaagtaattttacaatatgtaattcttattattttagcattgtcaaaaaactgaagtaaaatttctaccttttagacggtgtaaatgtccaagaatgcatagttgttgtagggaaagggaattagtgtacatgatatctgattgtttctgtcattcactcattctatgactttctccttaaccttatggttagatttatatttatttactatttttaacatgcaagactatcttaatgcttttcaattgaaatagttctacataattttgcttcttatgattattctgtatgaaagtcattacctcatacttttattgtgcaatatttccttgcatcgaagatttcgagagattgatactctattctcttcggcaggtctacttgtgtgagaaactgtctcttactaatgagatgtattttgccatcacccttgataggaaaactgctggtccggtatgccatttatctcagatattactttactttgctgttcattttataatttctatta

SEQ ID NO: 380 - DNA, 995 bp, Zea mays
tctagctagattcactccgctcccaccgtttggatttgtaatgtttgactacgtacgtggaagtgattcgagagctgtcccgccctaaatggaaaaaaaaattaaaccgtggacggtatagaatgggttggacgccgtggcaagcaagcaacaccgaatgcctgcatgcatgatgcatggcacagtcaaaaggaccagctagcgagtgtaacgtgcctgcctggtgtactacggtttggcgatatgtatgcatgctaggacttacaggtgtatggactatggaggcttctcaccgccacatcgcattcaggctaaagcgaggcatcaagtcatcaacagctagctagctagctagtatagatgggacgcacgcgtacgagtgtcaacacgtgaacaattcagaatctacgacccccgggggccgggggctaaagcgatcgaggcatcagcatactctctctcggtttctttaagcatgtgtgataatgatcccgttattattgcatatataggagtgatgacgattccatttcaaagaaaagaccacacgtgcgttgaaagagatctgtgaatgagctagcagctagtagtctggaaaataaactttattcgattcgatcagagctcacgcacgcacggctgtcatcagccggatgtgcactgtaaaaagggaagccggccggcgaaagtccggtccgagtctgctctagcggcgctggctgcactgcacacatgcatggttcctgcttgcttgcgtctgctgcaggacgatgatgatgtgaggtcaattggattcgatcctcctcctccagtttttctttggagcagctagctgcaacaaaattccacagtcgcacaattgactacttatttttttggggaaaaaaagaagctcacttcaaatggtcatgggtcgcggtcggtcctgactcctgattctgctgtgtaagaaaaaggagggaacaaaaaaaggtaaaaactaaccaagtagacaa

SEQ ID NO: 381 - DNA, 1998 bp, Zea mays
taaaacagatttctaaatttacaaactcctgaccaaatctaatttgatccctacatttatcatcttgttgggactcttgaaataaatgtttttgctaagatattgcgataagcatactctgactacggtttcgccgtctctttatctgccaccgctagataacctcttgtgccaaggtgtcgctagagcacctcctgtgctgcctccatgccgtagttgcgagggcgtccgtggatagtgtgtgctgttgttgcaatcatctggtccatcgacaactccgacctcccaaaacgttaaggaaggttattggtataaatttatgccatcaactcgatttaaaatagaaagtatgtcttttttttacattgacaacttaaaaaattaccaaccaatgttggagcataaacattttttactcaagtgttatagtaactttctctataatttagaatgctaaatttacataacttggattgctttatgtttgtcttgaagtttgatcttcaacagcccagggatataccaaatttaaagaaagctccataaatggtgcagttggcccgttaagtcagttattatgcacccctactgatgatagaatttggcaaaggtcattgttgttagttgtaactgctcaacattaaacctaaattaaagcaagtattatttacaccaggaagttttggccatatccccacaaaaactcacagaagaaattaaaattctctatatacagaagaacaacaaaagctgaatcactagtactttcctctgtttcaaacttttcagtgtatgccaagagcctggaatctcctcactagagcaagattggtcgcgttcctcctctgccagtcctccgtgctctccttcctctgctccagcttgtccagcacgtcttcgttgccgtccagaatgctcgcgatcttcctcatgctcggccgcgccgccgggtctgaccgggtgcacgccatgccgagccgagccagccgcacgagctccctacggtcaaacttgccgtccagccgccggtccgccagggcctccaccggccggtcctgctgctcaaggagctggaccttcctaacgaggaggacctccggcagcctcccgtccacggccattgtgccggtcaccacctccagcaccaccacgccgaagctgtagacgtcggccatggtggtcgcctcgcccgtgtccatgtactccggcgacatgtagccgaagatgccccgggccgagctggcggtgaccaccacgtggtgcccgccgccgtggcgctcgttcctcgacaggaactcggcgagcgcgaagctcccgagccgcgggttcatgtcggggtccaggaacaccgccgacgacgtgatgctgcggtggatcacctgctcgtcccactcctcgtggaggtacaggacggccgacgccagcgccctgacgatgctgtaccgctgccgccacgggaggaccgcgccgcagtcgcgccgccggagcaggtggtggctcaggaggctccccggggagtagtcgtagacgacgagcatctcgccgtggtccgtgcaccacccgcgcagctgcacgaggttcctgtgccggagcttggccacgttgcatagctccctggcgaaccggacgcgcagcgccgggcacgtcttcatgccgaggcgcttcacgaggacgtggacgcggccgtggccggtgtccaggaagccctcgtaccctgtcccgaagtccagctccgcgaccacctgcgactcggagaagtcgttggtgatggcgacgatctccttgtagggtatctcgcgcggcgtgtccacgtgcgggatcgccacgggcgctagccgagacgacgaccgccggccggagtcagcggacgcggacctggaaccggtcgtcctcccgtcttccgcggtgtggtagatggtgtccgcggccgcggtgtcgtagacggggttggaattggttagagacgtcgccgccgtgctcctgtcggtggtgacgtga

SEQ ID NO: 382 - DNA, 2132 bp, Zea mays
agctagcatgttgcattatatctataccgaggaagatggtaactgtgttgttagcgataattgaaaatttaacattaagtttgttgcaatttcttatccccttgagtcatatgtgttggcaaactgttgtttatgtaatactgatgtattaccactgtttgatattttccattttgttctttcataggtgactttctccttactaagttccatttatttgcttcgttgttgaaataggttcgaatatggagtatggaatctgtgcataaggacaataccaacaatgattcgaagcaaaggttgcttgctacactgcgtgatcattttggatcagtgaactgtgtgagatgggccaagcatggccgctaccttgcttcaggatcagatgatcaggttatcctaattcacgagagaaaagctggctcaggtacatctgagtttggtagtggagaaccaccagatgcagagaactggaaggtcattatgaccttgagagggcatactgccgatgtggtaattatcttctaaaattccactgtgctgtgtttatgtttgtgataattattttgtaactatagaacaccttttccatttcttgtgcataaggtaggtagatcttagttggtcccctgatgattcaacgttggccagcggtagcttggataataccattcacatatggaacatgaacaacggcatttgcactgctgtcttgcgagggcacaccagcttagtgaaaggggttacctgggaccctattggttcctttattgcaagccaatcagatgataagactgttatgatatggcgtacaagtgactggagtcttgctcacaagacagaaggccattggacaaaatctgtatgtcgtatttttttatttctctgttagatctagctgtgatcaacctgtcttactgaatgcctttctcattttgtttgttcctgcagcttggttcaacattttttagacgacttgcttggtcaccttgtggccacttcataactaccactcatggtttccagaaacctaggcattcagcacctgtgcttgaaagaggcgagtgggctgcaacttttgactttctagggcataatgcgcctattgtggtagttaagtttaataactcaacgttccgtaagaatttctcaaatgaccaagacccaaaggctgcaccagttggatgggccaatggagcatcaaagacaccaacaaaagagcagcaaccatataatgttattgctattggaagtcaagatagaactattactgtttggacgacagcgagtgcccgtccactatttgttgctaggcattttttctctcaaagtgtggttgatttatcttggtatgagatgtcaattatttctctacaaccattattaacttgtatgctcaaactcatgttgatattgtttgtttcccttgcaggagccctgatggttattcactttttgcctgctccttggatggatcagctgcaaactttcactttgaagtgaaggagcttggacacaggttaagtgactctgaaatggatgaatggaagaggaacaggtatggtgatgttggaggacgacagtcaaatctagctgaaagccctgcacagttgctgctagagcaagcatcagcaaagcaatcagctggagaaaaggtgacttcaattgtcgagcaaggtaaagcacccccaaaagtttctgcaggtgtgcctaacccaggtcttgttgtgctaagtctcgaagttcctgaagtgtcacatgaagactctaagaagacagcaggtccaactgctgatgatgtaaaaaaaggcaaccagttatctagtccagtgaaacagagagaataccggcgccctgatggccggaaaagaataatcccagaggcagttggatttgcttccaaccaggataacatacccaaccattctcagaatcatcctgtgaatttttcatccctggatcaacgaatgaatggaacaaaaccatcttatggcagtaacagcaactctaataactgtggagttaaggatcgcactagtgtcacagcaagggcaaacataactgagagtcttgttattcaaaaagcttcagccggtgctggcaatgatggaaggctgagtatagaacacacc

SEQ ID NO: 383 - DNA, 1956 bp, Zea mays
ctccatttttactttcataaaaactctacatctttgtcattgattttctatgcgttaaaaaaataaacatttctatgatttacagaaaaacataatactcgttaaactatgaaaggatcatgatagatacgtctaattgatgcctgctatatcctaaggttggacagtcttcaccaaaatcattagttgcatgaaatgacctcaaataccggccttcatagctgcaagaaagaacaaaaaaagttcatgaatcaaaaaacaatgcatagacattagaaggtgtttatctaatatgagaaggtaatcattaagtagaatttagtgtgttctcttcgaaaagaatttggcatataatatttatactcacaaagaaaatgtgttttcctcataagaagcaccaaacctgcaaaatagaagtgaagcaaccgtttctttgcttgtccattcttcataaaatgtgattcatcagctacgacaatttggaggaaaatcattaagccacgtcacaatcattatgatggtttttccctaatggaagcaaatacagtcaaactaagccaaaaattgtctgaaaccaatttgaattgttttagtttttcaggaaacagaaggcgaggtagttacataaaggcaaacaattttaggaaatagcatgatatccgagttcacatatttaaaaatgctattagtagctataaatatgtaaagataaacaatttcaggaaataacatgacatcatgttcacacatttaaaaatggttttagaagctataaatatgcaacatattttccctcactctaatgactatgtcatcgttttctaagaaaatatgtaaacctgaaggatatactcatgtttatccaaatcacccataaaacatgaggtaaatgaaaaggtccagtgaatagtgatggaaacaaaataaaattgcatgtcacgaactacttttggataatgaattacacatggtgagtacatcattagagatggaccaatttgagttcgttgttggtgtcacaatacttacaggatggaagttctgcctattataaacgagcctactgctgcatcgccagtatatggttttgataaaaagaacaatgaaacaattctggttaagactcaagagaattcagtgtatggtgaagcttagagcaaggtaggataaaacacaaggaagaggagaggaaaatacatagttgatttgtatgagaagcacatgatatttaagataacagagaagaaatatatagccgacttccccataacaatttaatcttttgcgaaaatggcaggtcataaatgtggaataaatattccctagattaaccgatgctctaccaatctgaagtaccactatctacgcagtgaggaccgagaagcatttgttgctgccaaatttgaaggatgaaaaagcagcacataacgagtggaattataaaggcatatatcacacaaagtggaggataaaggactaatccatcaatgcatcagaacatgcagttagcatctccattactttccttgcacatgcctaaaacagttgagttgtcctaacaaactgtagtgaaatggtctatcaagtatcaagcaatagcaaaaatgtacaagagaatgagcagatactgcctacattccataatgataaaaacattctgaatagggaaaagtcatacatcccagaacaaaaggaagatagaaaagatgttccccagtgacatcgcatagtagcaaatttcatgctggaaatgagagaaaaatataagcaaaccaattcctttattgcaagcgaatgaaaatagatcatccaccaacgccacatgcagatcaacctctgcctcttcaatttctagatatgcacagttttcacagggttagcgaatcacatcaaggctgacccaattacaatataccgagaaacagtacataggcttggtggcggggcgtctggatc

SEQ ID NO: 384 - DNA, 530 bp, Zea mays
tatataatctagtaaaaaaggtaaattttaattttgggacggggagagtatataactgatgcttgaagtataatgattaaataatatattatcgatgctcgaaccaagtatattttataaaatcttgatcgcgttataaattagggagtaaacagggtaaaaaccaggcataaataagttataagcaatatatttatactttaataaacacgcgttgttccaagtggatcgggtaataataaaaaatgtatgcatgggatgcaaaatgattagtgctctcccgtagacccgtataccagattatagatctcaaactaataataatataatcgaccaacctaatctacgacaaagtatactccctaatctacgagaaaccgcgatacttctccattgtggccgtctacttgttctcctgctggtcgccaatgggcaaaatggtggcgcttgtttgtccgcctacttgtgctgctggtcgccggtggacgaagacccttgttcctcttacggagcttgtgcgagaggcatgg

SEQ ID NO: 385 - DNA, 1998 bp, Zea mays
agttaataatggttgtagagaaataattgacatctcataccaagataaatcaaccacactttgagagaaaaaatgcctagcaacaaatagtggacgggcactcgctgtcgtccaaacagtaatagttctatcttgacttccaatagcaataacattatatggttgctgctcttttgttggtgtctttgatgctccattggcccatccaactggtgcagcctttgggtcttggtcatttgagaaattcttacggaacgttgagttattaaacttaactaccacaataggcgcattatgccctagaaagtcaaaagttgcagcccactcgcctctttcaagcacaggtgctgaatgcctaggtttctggaaaccatgagtggtagttatgaagtggccacaaggtgaccaagcaagtcgtctaaaaaatgttgaaccaagctgcaggaacaaacaaaatgagaaaggcattcagtaagacaggttgatcacagctagatctaacagagaaataaaaaaatacgacatacagattttgtccaatggccttctgtcttgtgagcaagactccagtcacttgtacgccatatcataacagtcttatcatctgattggcttgcaataaaggaaccaatagggtcccaggtaacccctttcactaagctggtgtgccctcgcaagacagcagtgcaaatgccgttgttcatgttccatatgtgaatggtattatccaagctaccgctggccaacgttgaatcatcaggggaccaactaagatctacctaccttatgcacaagaaatggaaaaggtgttctatagttacaaaataattatcacaaacataaacacagcacagtggaattttagaagataattaccacatcggcagtatgccctctcaaggtcataatgaccttccagttctctgcatctggtggttctccactaccaaactcagatgtacctgagccagcttttctctcgtgaattaggataacctgatcatctgatcctgaagcaaggtagcggccatgcttggcccatctcacacagttcactgatccaaaatgatcacgcagtgtagcaagcaacctttgcttcgaatcattgttggtattgtccttatgcacagattccatactccatattcgaacctatttcaacaacgaagcaaataaatggaacttagtaaggagaaagtcacctatgaaagaacaaaatggaaaatatcaaacagtggtaatacatcagtattacataaacaacagtttgccaacacatatgactcaaggggataagaaattgcaacaaacttaatgttaaattttcaattatcgctaacaacacagttaccatcttcctcggtatagatataatgcaacatgctagctaaaacagaatgaaaacaaaacaaataactctaaggtatcttattgtgctattcaaatttgagaccagaaacaatgattgcacaacaagtccctgttaaaagacaggttatctcactgatgcagaggttatctcagatattcccaatagccaatttcacgtaaatttatattacccggaaccaaacaagctggacccaagaacatagacaaatcctcactaaagcacaaaaagttaccaacaccgcagttagcgcaatgaacacacaacaaatgtcatgttattagcactgaaaaaaaatgtaagggcatgtttggatgttgtagttttgagggatcttggtatgaagaaattgttgttctagaaccaagagaagtgcaacaccacaatttaaataaatgtgctctagagtgcagtttcgaaaactcccaaatgactaaaattttagtaacacaatggttttaggatctaccaggtttgttacacccgaacacattatttccaaaaccaaattatcacacaagatccaaaaagggctaaagcatgaaaccataagccaaatatatagttttttgagtaaagtgcatttccggtcccttaacttgcgccgg

SEQ ID NO: 386 - DNA, 2472 bp, Zea mays
tgaatggaaatggaacaatgtcatcgtgtggaaaaaagtgaaaaaaaaactgaataacactgcaggccaatgagtgaggcttgtaagaactgcgtgtggtgaggaattcctcccgcaggccgcggcacacactcagattcaatttagagcatgtggaatcaatcaaacacttactccagtgaggagcgagctgattcagccgttggagaagcacgggtactatttaaaccgctgcggatttattatagaggaaaccgacgttacctccgaagaggcgcccaacaagaacagcgggacgcctttgtcgtcctcggcggcggcgcggagctgtggttggacagttggagcgactcttctgtcggacaagacgatgagcacggcgcaccctactttgaggccacacgtccacaacagccgtccgatcgcacgacgacggcgcaaagttgaaccgagcgaggacgggtctgggctggctctggtttgagccgacgaccggacgacgtgcttcgcagttcgcacgaacaatctggactggagtcgagttctgcgcaagagcgggcccgcccaaaacaataggtggcctcctgctctcccatgcatctccgtcggcccaacaatacagagtggcccaacttctccaatgcgcaactgctgtacgctcgacgtgaaggcgcttctcccaatctcccctccgactcccgttcctgcgccccaaaccctaggtccgttcgcggcggcggtggactgccagtggcagctctccgctcggcttggcttgggcagctgccgcgccgcgcacctacgggcagcggctgggcggcccgcgctcgtggcagcactcgctgagactgagaccgccaccggcggttcctgggctggaagccggtgcagcagcaggcagtagccatctcggccgccagttccaaaccctaaccgagtaaccgcagccgcagccgcagccgcagggtgcaggcacgcaccagcctcacgccagccgcgccgccgctccggccagccgcaccccgtgccggccagctgcgcccacgaaggtgaaaagcagctttacttgccggcttggttttaagtacaattcacatattaggcttgtgtcatcaagaccatgactaggttagcatctctctgtttaacacttcaacatctgatattgcactgtttctgataaagttcaactcgagtatggctgtgtttcatactgttcgatgtgcccttacgctcggtgtttcttttcctgatttcctttctaaaaatagtttaatattttgggttgtaacactggaaatctgctcctttaacatttggaggtggttattccctgtttatcagggttaaaagccaccttttctttatttcttcactggaactctactttctagtaatatgacaaacaaggttaattggtgactaaaagaagtttgactctgaagttcattatgttgttaagtacagctgtggaactctatttgcaatatgtttacaatttattctgatcacgatcacattttaattttcttgattatatgtcagaattgcttaatctgaaatcttcagtccaagggaaagggaaagttccttcaggctattttaatgctctctataattaagtggagcttggttgactgatgccaaagagaccaagcatctagcttcgactgatatttcatttctttgtactacttgcacctaaaggcttctccattagttctttgagatgaagtaaaaaaaaaggctgttccatccaagtgggatcctgttgcattgtcattaggactaaacgtcggccatccttgttcattgattgtggatcagagcagcagtggcatttcaatagtctcgtgagggtaaaaaaacccaggcaaaatgagttaaaaagtttattttttatctttcacggctggttactctgggagagctgggtcgttaaatgggtcaccacctagcgccttttctaaccttgagtaggtttgttgtaagcatgcttatttctacctattaatctaaatgtgcagcaaatttagatttctgacgtcctttcagttgaccttgtttgcagttccattatgacaagttctcctgtcgtatactgttttcctttcgcttttgtatacccacggtattgatattgtttatcagtattttgtgtataggaatctcaacttctttgccgaggtttatcgacagttgtatttgttgggaaaagtagcagtttgactctatataatagagagtgccatggacggacctgagtctagtagaggtcgcagtaagcaggaggttgatgataatgttaatgcaaggaatacttggaaggaggagcaagaaaatcaggagaatgtggatagcagaaattattcggatatatccagaaaacatggatatgaacatgaaactgggcatcaggatgataatagaatgattacaccttcaaatgataggaatgaatcaaggaggaat

SEQ ID NO: 387 - DNA, 1900 bp, Zea mays
ctgagaagggactcacgatctcctaaagttcaaaggagaagccctgatgattccaaggatcgagactatgatagaaggaggggaagaggggacaataatgattgggaaccttcaagaagatttagccctgatgcttctgctaggagttcagagagaagagagggtagtagggagaagcaaggacaacgggatcaagatgaaagggcatcagtcaggagggtagatgaagtttatgttgatgaaactggtggttctcttagagttgacacaagagaagcttatagagatgataaatctgacagagggagggataggaattggaatgagaaaacccgagacattgaaggttctaaggactatgggaggaacactcaattacgagatactaaggagccaaatgattttgaatggaggaatgcacaggaaaggctagatggcgggaatttccatggccgaactggatatcggagagattctaggggtagatctgaaagtattagaggtccctcaaactatgggaaccgatacgacaattcagactcaatagagattcgacctaatagtaatcttaactttggaagagagggctctgtttctggtagaagatttgaaaccggagcacaccgagattcagtacctggaggaactgatgataaatcctctgatcatcttgaaccagatccaagtggtagcacaagcatggtttcttcgtttcctcaacaaggtccaaaaggcgataggtcatctagaggaggaaggggtagaccaaatggaagggattctcaaagaattggagttccaatgccaatcatgcctcctccatttggtcctcttggacttccaccaggaccaatgcagcatatggggccaaatattccccattctcctggtcctcctctcctacctggcgttttcatgccgccatttccagggcctctagtgtggcctggagctcgaggtgttgatgtgaatatgctttctgttcctcccaaccttaccattcctccagttgctccagaacataggtttgcaccaaatgtgggagctgggtctagtcataatatccacttaaatcaaatggacactgggttaggtggtccagcagatatatcaggtttgggttacaataatatgggtcctcaaagccgtgaaatgctccatgataaacctggttggatgccacataggaacagtggaccaaacagaaaagctccttcaaggggcgaacaaaatgattactcacagaactttgtggacactggcatgaggcctcaaaatttcattagagaactggatcttacaagcgtagcagaggactatccaaagttgagagaactcatacagaggaaagatgaaattgttgctaagtcagcttcaccgccaatgtattacaagtgtgacctgcgggaacatgttctttctccagagttttttggtaccaagttcgatgttattcttgtggatcctccatgggaggagtatactcaccgtgcgccaggaatcacagatcacatagaatattggactgctgaggagattatgaatttgaagattgaggttttccccttttctttatcctttctattttgtgatttcatttatgctgcagaattaatatttagaagtgtattttttgaatcaacaggctattgcagatacaccctcctttgtgttcctttgggttggtgatggtgtaggccttgaacagggtcgtcagtgtttaaagaaggtagagcctgctatttccgtacttaaatgactgcgctctatattattattgtaatgccattcgttttgggggatggggtgggatcttgaaatcattttttaggaggtcacccaggttcccgcagcttcaaatcaatttttgccctctgatgttacttctcggacatgaaga

SEQ ID NO: 388 - DNA, 2127 bp, Zea mays
ccgcgacaacttgtccacggtggctccgacgggaggcgctcgcccaccaccgttttggcatcttccccgacatggatccagcgcctccatatcgatgtcttcctcaaatgctcagatctgccccctccaccacctctagcctcacgccgcgctttgacagctttcccgcctcggatccagacgccccgccaccaagcctatgtactgtttctcggtatattgtaattgggtcagccttgatgtgattcgctaaccctgtgaaaactgtgcatatctagaaattgaagaggcagaggttgatctgcatgtggcgttggtggatgatctattttcattcgcttgcaataaaggaattggtttgcttatatttttctctcatttccagcatgaaatttgctactatgcgatgtcactggggaacatcttttctatcttccttttgttctgggatgtatgacttttccctattcagaatgtttttatcattatggaatgtaggcagtatctgctcattctcttgtacatttttgctattgcttgatacttgatagaccatttcactacagtttgttaggacaactcaactgttttaggcatgtgcaaggaaagtaatggagatgctaactgcatgttctgatgcattgatggattagtcctttatcctccactttgtgtgatatatgcctttataattccactcgttatgtgctgctttttcatccttcaaatttggcagcaacaaatgcttctcggtcctcactgcgtagatagtggtacttcagattggtagagcatcggttaatctagggaatatttattccacatttatgacctgccattttcgcaaaagattaaattgttatggggaagtcggctatatatttcttctctgttatcttaaatatcatgtgcttctcatacaaatcaactatgtattttcctctcctcttccttgtgttttatcctaccttgctctaagcttcaccatacactgaattctcttgagtcttaaccagaattgtttcattgttctttttatcaaaaccatatactggcgatgcagcagtaggctcgtttataataggcagaacttccatcctgtaagtattgtgacaccaacaacgaactcaaattggtccatctctaatgatgtactcaccatgtgtaattcattatccaaaagtagttcgtgacatgcaattttattttgtttccatcactattcactggaccttttcatttacctcatgttttatgggtgatttggataaacatgagtatatccttcaggtttacatattttcttagaaaacgatgacatagtcattagagtgagggaaaatatgttgcatatttatagcttctaaaaccatttttaaatgtgtgaacatgatgtcatgttatttcctgaaattgtttatctttacatatttatagctactaatagcatttttaaatatgtgaactcggatatcatgctatttcctaaaattgtttgcctttatgtaactacctcgccttctgtttcctgaaaaactaaaacaattcaaattggtttcagacaatttttggcttagtttgactgtatttgcttccattagggaaaaaccatcataatgattgtgacgtggcttaatgattttcctccaaattgtcgtagctgatgaatcacattttatgaagaatggacaagcaaagaaacggttgcttcacttctattttgcaggtttggtgcttcttatgaggaaaacacattttctttgtgagtataaatattatatgccaaattcttttcgaagagaacacactaaattctacttaatgattaccttctcatattagataaacaccttctaatgtctatgcattgttttttgattcatgaactttttttgttctttcttgcagctatgaaggccggtatttgaggtcatttcatgcaactaatgattttggtgaagactgtccaaccttaggatatagcaggcatcaattagacgtatctatcatgatcctttcatagtttaacgagtattatgtttttctgtaaatcatagaaatgtttatttttttaacgcatagaaaatcaatgacaaagatgtagagtttttatgaaagtaaaaatgg

SEQ ID NO: 389 - DNA, 1235 bp, Zea mays
gatatcagcactagtagttgtaagtgttggaaacaaccgcaccgtccgatggctaccgttggaccaaggcgttgctactgtgagatgaacaatgcgatcgtaatagttcgacacctctcttcgctaacgattagggttagcttcaaaagtatggtacgacgcctccaacgggacggtcgatgcctaaacccaagctttactttgtttcttcgtgatttttttgcgtctaacttagatttctgtggctagcttggtctccatctttaataacttttataatattcttttgtcaagatgttgatcttctcaatcactatttagcattcaactaagttcatgttgtatcctttaaatcatattcaaaaacactggtgaataatgttaatctaaatagttaaaagaacactggcaaataatattagtctaaatacttaagttgatcaaaacttaactatcatccattaaataaaccttagtcttcttatagacacaaatctgacaaaaaaaatacatggtatgccttgccgtccttgatccacgtagcacaactaccaatgaggtagggtgttgcaaaggtttcaagcgagacatcggataagacaatcctatgtcaagttggatcaaataacatcagacgatagaagtcaggagaatcaaagttgacaagaacggaaacaaattgccctcaaactaattatgccgcaggcaaataaatacggtccaactaatatagcagtaacaattatcaagagtcgatcttcatcaggctccctaagccatcatgatcaccatacagatatataaaaggtaccgaatgacttgcacaaaataaccacagcacatcgatctaaagccaccgtgatatcacaagtcgagttagaagcagccgaacgatatcaagagcttgcattgcgcatcaggttagcctcttctgctgcagcccagccaaaacttccttaaacttgcgttccacaccgctgcacagatcctcatacccgcaacattccgtcttgatactcacgacctctgcatctatttctcccttctcctttgcaattttctggctttcctggcgaatacggccaagttcttgctcgagccgagctgcagcttcatctttttcatcaagcagtgcaccggctctgaaagaggaagccatcttctctactaactttgatctcagcttgccaatttctccatgataactgatgcgctcagatttgagcttgaccaat

SEQ ID NO: 390 - DNA, 1099 bp, Zea mays
gggagattgtcctgatcttgtcatcaaaccatcccatgtcgttgtctatgcttgcttccattgtaaccttcatcaagttcgcaaatgacaccatcatacctaatgccattccttcacacagtgttggggggagttcttggagtggaaggaaatgtggtcgttgaggtgactccttaaacacatgcattgcttcaactatatgccatatagatgagcgcttgacgaacaaagcctgctgtgaaggcaacaacaagctcccaaaagaagagcaactcaatggagaactgtcaatgatgcactgtaaacttccagcattctcaagacgtaaaactgacctcccatccacttccccacaggattgttgagccggacaatcaataggcaggatagctgttcccatcacatggttgatttcagctaacctggtagtagcagcatggtctgtgcgcatgtcgttattttcattcggttgaatatgactgttagtcatacccgttggctcttccacttccccacccccacaaagttgttgagccagacaatcaatagacaagatacttgtttctatcacatggttgctttcagtcaacttggtagtagcaacatggtctgtgcacatgtcgtcatttttattcggctgaataacagcatggtctgtgcacatgtcgtcatttcccttcagttgaataaggttgttagtcatatccgttggctcttccacttccccttccccacagggttgttgagccggacaatcaatagccatgatagttgtttccatcacatggttgctttcagctaacttggtagtagcagcatggtctgtgcacatatcgtcattttcattcggttgaataaggccgctggtcatatctgttggctcttcctcatgtagagtgtcatgtatgttagtacctgaacacagaaatccaatcattaatctactacatttatgtatgccttcagttatgtagcaaactatgcccattttgaccatgggtagagtttctgcagttcatacctttcctgttagacattgatttaaagctaggaagcagcatggataacaggttctcctcatttgataattcagttatat

SEQ ID NO: 391 - DNA, 2863 bp, Zea mays
cggacactccaactacatgtaaaatagtaaaaatctaagaagctgatggctaatataagtattagtctacaaaagaatcttcttactgctaagagacattcttccattggctctgccatttccttgcttcctccctgctggtcagtcctggtcatatccaatgagctatttagactgcacagtcctttcgatcctctcttagccactacacattgtacgacaactgttagatttaaattaccacctataaatatgaatgtgttccagagaaaacacttacatttcttacaggcaagaacctttgtacttgaagccctttttcttcctgttgactcctaatatagattgaccaaaaagaacagaacaaaaaacatgaatataaatacagaaagggtgtttaaaagccaatcataactcataagtctgtaccatggaaaaaaaaatagcgcgcaatagcggcttagactacatgacgcaacgatattccgtgttttcgcactaacgcggcccgggggctcaccgaacgcggctgcgcggcacagggtctcggcggctgggcgacggcggctgagtgaagacacctttacgcagggctggttactacttgaaccctttctattactatcaaaacaagttggctatagaggagaatgaaacatttagagatggtgtaatcacttgcattaccaggcttgttccaaatgaagataatcaagacaagattattgaagtgctgcaagtgtttcaggatgctgaaggatcctttggcaaagaaattgctagaaggcagtgaaaaaatatcaattttgatccaggtatgaaaaattgattaacaatgtcctagtttataaacaatgtcctagcaatgaatcattcatcctaaattcctaatttacattgtcctctgtttttcactttttccttagctaaatggtggctgaattatgcaagtagtgcaccaaacctcaaaaagttagatgcgagatttctaagtttgacatgcagttcatcaggttgtgagagatgctggagttcatttgaacaagtatgaatttcacacgtactgagttctttaatccattttttgttagacttattgaaataaaaaataatgaaatcaaacctatgcacgtccactcaaagagacgcaacaggctccttcatgacagaatgaaggatcttgtgtttgtcaagttcaactcaagactaaagcaaaagaaagacgacaaggataaagatcccattgagaaacctgtccatgatgttgttttagaagatgaagacgacgagtggatcactggcattgagccaacagaaggagatgaagagcaagaagaagaaactgaaacatcatcacaaggagttgcagctgcatctcaaagagaaagagaagagagaactaagagagttaaccagcagaaattaagaaacaggaagagaaataggttaatccctagtttccctacatttgaggaagaggagtcatctccaccttctgatggagaagataacaatgatattgatatgcatccttccgattctgaggctgaaccatagaagtcattgctctaatgctcttggattgtgaacctatggctgtttggtatttgcttatgtacttgattcttgatgccttcatggttgaattatgaacttaattatgttggctaaagattatgttggttgtgaacttgtggctgtggttatcatatattgtgtgttgtcctgttcttatgaattttgaataaaatagcgcgctatagcggcgcaatagcacgagcaagcagctaaagctactgcactatagtgcggctatagcggccagaacaggcttccgctaattttgatagcgccgcgatcaaaaacactggtctgtaccagtctatctggagatgaagtagtctggccaaccctatacatgcccaaatctaaaacaatgtccctagagaaattattgttttccttccactgaatctgcaccagcaaaaagatcaaaattagcagaaataataaattctatgcgggcattcttactcccccaacaacaaaacataatgaataagactcaaactattagagagacccacatttccctgaagttcttgaatagggtgtgttttcccgtctttactattcgatatacatttcttcactccgagcgatttaaaaagttgtccctctgtgtgttggacagcatgatttctgcgagatgaagctattttctttcttattccagcagtggaaacaataccatgggcatcaacatttcttccacacatagatccatgaagctcaccatccaaaacacccatatcagacaggatttcttggttgtccactggtgctgaatgtcctgaagaagaacaaagaagtccattcatttgaaccgaattcactatcccgtgtgaaccttgaggactgttcttttcagagagcaaagaattcggtgaatggatgctttcaggtgacttgcacatagctgacaaaggaatgcccatctcagagactgaagcatgttcagaaccttcaactaatgtggcatatggcagcttcagttctttcgtagactttttgatgaaagaagaatcaggatcgtgactgtcttcttcaccactggatgtcaaatcaattggtgagatttgattttctccacgcttagatcgcggcctcaagttagtctgtctctgcacaagaaaatatttagaacagatcatacaagttgaatgatagggtgttgtattgttataagctaaaaactgaaagattctttagcaatgtgctatatgcctatatacatattgcatgcaaatggttaagcaaatttcttaaactcgcaagacagccaatacggtagaaattctgc

SEQ ID NO: 392 - DNA, 501 bp, Zea mays
acgagcgccagaaagagagagtaggaggcgtgtagaagaagtatgttgactgtttgaacaaaggaggagaaatgacgaagaaatatccagatggagggcgccgcaggataaaggaaaagggaatttgtccactctaatttttctattatttcctcttttctctctttttaacacaatggatacaaaaatatcctatatctagaatcagggtttgaacgtgatgtaaatggctggctttgacattttaatctgtgatagattctcgacgaaactaaatcaattaacaattagtcgattttggatctatttaccttggtccaacatattttgcaccaataatttttaccaccgagttctaacaatatttgcttaagacaaaatcatatgacgaggtttgagcctccaaattcggtgttgcttacaccaattaatcctaagcgggcaagagactcgatatttcgtggaagaaacaaattctgaagtatgccagacggacgcaac

SEQ ID NO: 393 - DNA, 1972 bp, Zea mays
tagcccacgttaaaaaagctaaaatagcaaatttttcgacgacgatgggctcctcgagcccatggccacgactagcattgctactcgtgacagtcgcatatatgaggaagagactaccaaaatctagactctaggctaactttaacaaggtgacgacgttcgacggtaaatgtaaaaaggtaaggatctttgatatcagcaaaccatgcaagagtactgtcggagagaaaaaaatattaaattctctgagaaataagtgaaaagtaaatttgttgcagggaaagatacaatgtttgatgggctacagtaaaaatatgttgaacaatagaaaatacagtggcagtatgtctaaactacggaaaaagagtacatagttataaatgtttttttcatgaaactaaatactactttgtagtatagttataaatgtttttttcatgaaactaaatactactttgtagttgaagtacagaagagagaaaccatacctctataagttggtagccaaataattgtagccccgcagaaattgttgctattaaaacaatttttagaaatgtataagtgactttatgtagcagcacccatatcgagtagtagcaacagctcgaatgaaaataaactatatgtcagatgtatagaggacccatggtggactgccatctcgaaaccatacaaaaaattcttatgatgccaacagagaacaaatattgatagcaagagaaacgatggaagtcaatttaagataactataaacctttctccatgatcataaattgaatgttgtttaaaaatgatatttgagatctttgggaactcatctccatgttcctgtttatgctatctctgaatgaaatgttcttactcctaatgaaaataacattatagaactaaaatggccaaaagagcgatggaagtcatctttaagataattataaacctatctccatgatcataaattgaaagttgttataaaatgatacttgagatctttgggaactcatctccatgttcatgtttgtgctatctctgaatgaaatgttcttactcctaatgaaacaacgttctagaactaaaatggccaaaagaggtgtcgaagatcataagtgtataattatcagtataaacctatctccatgatcataaattgaatgttgtaaaaaaatgatacttaagatatttgggaactgatctccatggtcatgtttatgctatctctaaatgaattgttattactcctaacgaaaacaacattctagaattggaacggccaaaagagttgtcgaataccataagcctataattatcatgaacatttatataccaaattgtcactttcaggaagacatttacaatgaaaataatctggtttctgatttggatataacttttttgtattcaagcgtaagagaagaaggcagtacatatgtaagtcatcaactgaaagtgctgttctttacggagaatcattgttataatgaggaaatcagggaaactacatgagtgccaaaaaaacatgacaatactcatattgtttaccaaataaatgagtagactatccatatgatgtaatcatatatggggtccaaaccaaaaggaaatatagaatcatacgcggtttacaacattacaattgtaaaccgaataagtgttgttatttacgaagaatcgttgttgtaaacagaatttaggaaaactacatgtgtgccaaaaagaaagataacagtactcatatcgtttaccaaataagatgactatccataaaataagtagactatccatatgatgtaattatttatgggttgcaaaccaaaagctaatatggaatcatatgcagtttacaacattatgagaacagtgcttcaaaaattaaacaaagactatcggaacccaaaaaaacaaaagaatggtcacctaattcagtaacggaggctgggttgcactaattggattgattgattgtccctaccta

SEQ ID NO: 394 - DNA, 4152 bp, Zea mays
aatgcagaattatgagtattattgatggcagtttggatgctcacctctacttccttggctgcttctgcaaggtcctcatccatcgatttgctaagagggggcatttcaatctgggtatagcaacacagcatgagcaaggtaaagaacgaagaaaaaaaaaggtgttccagagtatggtcctacaaatttcatgtgactacagtaatgcactagctagcgtgcagtgttttataaattgaaatctacagagtgaaactaaatatatttaactacctctttcagtcgaggtaaggttgtttcgatttttttccctgcaatgttatgaaggtaaccatacagcttcttcattgtctttatgaagttcgatagaacctgttccctttctatcccgagctcttcctgtgattaaataaattagagaacagctgtgagaaatcttgatgagaataccaagtactttggacttgcttgggattaaacttgagctaaccttcacagtgcctatgtctttgtcctgcaggcctagacaaaacaaaacagctgcttgggcaccatgtaatgacactggaagcctctctgaaaaatactgatgtgcaaggatgggtacaagatccaggatctgaaataccaatcgcattcaaattcagagtgatgccttagatgcaaaagacagttatttcacagcacagcagaaaaatatactctgcaaatgcatcaaaactacatacaccttatatattctgaattggataattgggtttcttaccagatgataatcgactaaattgtttgaatacgcctctagtcgtttcatgtcatgtggtgatagcatgtcttccaataattttgaagtgctattattatcgtattctgaaggctcatggtttgagtaatcaatcttcgaagccaagacactagaaaatataaataaaaaagaaaaaaaatcagaatacagaaaaaatactgcactaatgtagttcaaaagtgcatacctcattgcaagcttaaaattaagatgccggaaagaagttcccaaaagccgcctgaatctttgtctgaaatctgaacataggtttcaaatttagctaatgcacccaaaaaaactttacgtaaaaaacgatgcaagaaaaaacaaaacaccatctgtgcatctaagattaggaagtttaaactaaatttgtttactgaaattgtggtaaatacactaagcagtttcagctagaaatgtaaaatagattgaacaaaacacacaaaaaatagtaccttggtaaaacggatccaaaaatccatgtttgtttgactcactaacttcgatgtcatcactgtttaagggtctcaacaccatacaggtatgctcaccagtaacagcactctgaaaaaatgaaatagcaataagcacaacagaaggtgaaacactaagtactgtcaatctgttatggcaagtccggttagatatgattactggaatctggccgacatagaacgggtagaagttgtgcttccgccaaaagcggaaaagctcttgggtcagtccaaaagatacaccaagataatggagcttctcaggacgacgttcatgaagatgaacaaggagtggtggaagatttgccctaggttttatggtctcttctagcagtgaagcctgaaacaacatataccaagttaaaagttgatgtctctttggagacattcgataaaagttgttagactcagtgctagcatatttattatatgttaaatccttcttacgcctttattaaccagcagaataaataatagtaattttatcattagtaatacaatcaaatagaagggtatatgcaatgataaatatccaaaggaaacacatataacaaattcactattcataaatttcatgaggcaacatacaaaaattccaatgtataagagatcattcaacaagtgcgatgtttaactcgaaattgaggatgaaacttgcataaaagtggacaaagtaaaggattgtgactgggtcatagtatggatacaaccaaattattcaaaatagaaaagaatgtattgataactatatgcctgaaccacctagtaaacaatcatatactccatattgtacagtagaaaaaaaattgaaaacatgtcatatttttctaccaaatagtttagctgtaatagtagtgggaataacaatacaattttcagtagttagtgttgtatggtttgcaaaaaataaattagcaacaataacagaagatatgtgaaatatatccaagttcctctgtaagcttagttccagctactttcaatatatgaaatacaagaatgaaaacatttaagcgtatgattgagtacagacagctttggattcaaaccttctctgcagcttcagcaatcttcacatcaggctcttccgtttcctcctcatcgtcatcaaataatcttctcatttgcccttcatagtaccttcaaggaaaaaaaggtagctgtcaaataaatagaaacagctatagctgtattaggtatttcattcagtccttttcagacaatgtgactcataaacgagaacctatgaatatatttcaaagaaatacttatgtacaaaagttgacatgggtgaaaaagtgtaacatgattggaaaacgtaaacgtttaatacagaaaatcaggagggtggatatcaccacaatggttaagactgtaagggctgtgtttgttttagagtaaaaaataaagcaccagtgatcgatatatatcaggtgcaaagtaaagcagtgtaaagaagagtacaatttagaatcagaagcaaagcgccagtaatcattatatatgacttatgacataaggatgcaaactgaagcagtgtaaagaagagtaccgagatagaaggccaatggcagctgagccatacccaagctacacaaggcaaaaaacatagaatgatatacaaaatgatgtcaacttacataaaccaaatcacataaatgtaaaaagaatgtaccctcaaggcgctaggatggacagcaattcgcactatacgagctcctgagagacttggaaatacattgtcttggaactgttcacaaaatttccatggtatttgatcaccggaaggtgaacggccctcactcaggcttttcatagctgactttcgagagatttgtccttccaaacaaacctgaaatacaaattaaaatattacatatataatgtttctgcattacatggcgcatatagtatgaaatacgcttaaaacgaatctaatatcaataaactgaacagtgtagatcatggtggaatatgaaacttgttagtggctttggtgtttgattagaatatcttggattgaagccaacaactaagaatgctagttctcatggtgacacaaaaagaaattaaagtcaattaggtcaatgacatataactatagtaaaaaaaattgctgcacttggtgtctatgttaggagaaatattatgcatatatgtggcaatggttcatgtgacccggggtgctgtacagttgaagaaccccagggcttcttcattggcagtgaaagtgagccttgagctgatgtagaagtgaaccaaaaaggtgagagaagaaccaaatcttgtttatgagtcggtgcaagtgctttgaatattttggctgccgaggcttcttcataggtctacttgaagacatagttgcactattttcttaatcttgttgtgggtactacttgtggagtgattgaccaagaataactttttctaccatgcatgtgcacagtgtcaatgaatcaatgcagagctaatgctctaagacaacaatgagaaaaatcaggagcaaatttcaaaataacatcaaaggaattaattctataaaatgatcagaacctggattacacacaggatatcagggagctggtttttggactcatcaacagggcctatcaaacaaagaaacacaagtaggtagggcacaataacagtatcatatcgaacatatattattgcaagaggatcagtccacataccaagcaatacaaacaaatgatgtgctggtgcatctgccattaattgcatgtcattaggcgaatttttatagtgggaagcaacataaagtgccatcatccgctgaaaaatattaatgagaccactgtccatttaggaagatgaaatacattctccttc

SEQ ID NO: 395 - DNA, 2928 bp, Zea mays
tggtcttgagagtatcgctcgatggatttagagagggttatggatgtaggagtgatttggtcatatggattttataagaatttgagagtgttgtttgatggatttaggaaatgttatgggtgtaggagtgatttgacaggatgggttttattataaagttaaagctggtgggttatacaaggagtatagtcgtatagacttggtgagactctgtctcctgcttgcttttctgtttgagttctgatgggcctcggcctcttttaatattcagagacctggtttgaagcaagatactactgattttgcctggtgggccggacgggcggtggacggtctccatttgccaagctgcttgtacagttgtactcgcagaacttgcttcatgaccatgagcacaagctagcaacatgcaacattgcagttgcagatatatagtacatatttttttttggaaagggcggttgcaggttgtagctactgagataaaggatttttttataatgaccgctattagcaaaaacagttgaccgaacgaagtggtcgacgtccccttccggtcgacaacatttctgaagcatgcatgaatctgcttgttaaattattgggtgcgaccaagtagctcgtgtgtacatgcgcgtttacgggtatatgtaaggtgcatgcgtttctttgtccttttgacacagtccttagttctgcgccgaaacttttacgctatcatcactgtcatggtctctataagaagtcataaaaatagataaagctactatacaatcaagttttccgtatagtatagtcacgccgtatataattaaactatcagaaattataaaaaagaactcaaaaaacccatagatatgcagtattattcactctatttttctttaatatatgttttgatttacgatgaattagaatctaaaaaagacatggttattttacgaagcatgattggatccggacccccatgcattcacattcacttacgcgccgatgtggcatcatccgatcatcggtggcggcggcgatcaggtctggagctcggagtcggacgcggtcctggtcgtcccaactccaactccatgcagcgcttacgtgaaaggcgaagccgacaagaaagagacgagagctcgaatcaccgggctccacctccatgacacgtgagcagctgaaccggtccggtcccgcccggtcccggccccagcagcttcgccacccacccaccacgacaccacacctcagtcctcctcacacaaaaacgccaaacattttaaagcccccgcctccttccccgcggaaccaattcatcccccctcttctgtccagtccattcccccattctcttctcttcacgattccgcgggcgcggaagcccgaagcggcggagagatgtgggtgttctacatgatatcgctgccgctgacggtggggatggtggcggcgacgctgcgctacttcgcgggccccgccgtgccggcccacgtcctcgccgtcgtcggctacgcatggctctcctccctctccttcgttgtcctcgtccctactgacatctggacggtgcgcctccctcccgccgtgctgctagagtgcagagtgtgctaatgctgtgcctgtgcgtcgccgcgacctctccgccgctccgcttagtgcgcgcgctatcactattcactaattaacagagatcatttgcgcgtacagccgggttaccagtaaactgtgctggttgcgttgcgcggtcgtgcgactgcgggagatgggagccgttttggttaggacactggtaatgtagcgtcagaatcggagtttggatgaaccatatccatttctgaacctgttgctagtttactaagaaatgatttaaactggattaacttatgaataatggtggttcgatagcgtacccagtagtctggtaggtaatagtctcgatgccaaggtactgaaggtaggaattcgtggaaactgtcacaatcaagaaagtgattggggttagatggcgatctgaaatcgtcaaattggcattgggctggttctatgactcgtcaacggagtttgttgttgaaatttaagcacaccatcaacatcgataaagcaagtaggttttttatcgtcgctgtttggaaatggtctttagtaatataataataataattgcagatgaaaagaccatcaagatcaaggtgttgttacttgttacgctatgagcgcgatgtgcgctgggtctgcggcgtagtctgctttcattccgttggcctgacccgttatgccatttttctgactcgcaggcaatttctggcaacggcaatcagaagagtgacgtcgggttcttttggagctggtcgtattggagcacgtttatcctagcatggtatgccagtgaccgaccacaaaggctcgtgttctgttaatcgtccttctggttgcagatttgcagcgctgcaagatttcgaacggcattagtgatgttctctgtgtttctaataatgagctcaaaacatgacatgtcctttgcataatgttaatgcagtgtgaaacttctgcataagcattgaacttttaactgaccagttggtcagcgttcttttcttgagaaaaaattggtcaacgtctactgaatatttttttctctcaactagataaattggatcctttgagatggtcgcttgtcctgcattctacaagtagtactatctatgaacaatatgatcaaatcctgacatccagatcggcattgctgttttcattatcaggataccatatttatgatgagctctcactgacataagagcagttcttactggccttcctagttgctttcttcttatgaattgcttactttttttcagttctctaggttcacagttattaggtcgtttattaacatgtgcatttttgcagtactgtcatttgaaaagtggacaagttgtc

SEQ ID NO: 396 - DNA, 601 bp, Zea mays
cgccatgagcgattccacatggaaaatctcctcatcactcctcgaagcatctgagcttagagcctataaccatcaccgcttccaaattgttaagagcaaagttgatatccgtgaacgcgagggcatgtcctatgacattgattgttgcctccacaaataaacagaaacaattgatatgaattttatcctcgaatcattagatggagcctcaaagggtgccaaatgttctagttgataagtacgaacatattgtcagcaacccaagtgtaggagtgctgaagaatttcacagggaggaagaagaatgtggtggctgggaagaacagcgagaagagagttcagagtagtgtattgtctttcttcctgcccacgcctctgcctaccccttttccttaagtaatccctttacagagcatagaagagcaagtccaagcaaatgaccgcctaggcccaactaattgacccagttactacccattacacgggagtttgatttgcgcacacgtcggcccatctcctcctgtgctcactgtgtactgttggtgaagccggcacatgcctggggctgacacatattgtccttatacttcattaaggatgtg

SEQ ID NO: 397 - DNA, 2195 bp, Zea mays
gctatctcctttcatccctccttgtacatctaactaaacacaccacaagttgatctttccaccgccaccctaacataaatgttttgtgtagtgtatgttacaattatcttgatttccttgttttgtcgactccttggtgatcgatgtgcctaactggctaaagaatgatatagtttgtaaagatttacaagagcaacacgttaggttgtttccagaaagaatatcatttactatatacactatgcataggctatcaacctcgaagggacgcgcagctcgcatgtaattccggcgattgcacgtctttacaaaataagataattatatcatggtctcaaatttgtcgagcttcttcactctttgcatagatctgaccagcaatgccaaaaatattcctgcacattttcagtttggatcagaccaatcaggaatatatgtacatatagcttgaatatatagattgattctactacatggtatatatgtacatatcaacaagtttcgccagcctttgtgatactcctatatggttaaaagaaataagaggaccaacaagatgcaagaaacactgaaaagatgtgaggtgataatgttgttgagtacaaaattttaaaattcattttatgaaattatgcaagaaaggaaatcctacctgcaccaatgaaagagccgtttgcaattatctggttcccttgactattcagtgtgaccccaacattcaagagagtaccacccaaggctgtatacatggtggccatctgaagaacagtagctttacgtgcagcacgttctgactgcaaatgccattcagttcagattcaggccaaagaaaaaaaatagcgtagtagtttttaggcagaccagatgaggccaaacaaagattactagtttttagtagatttgagggcgatgaaaaaaaatcttgcaatgtatctcccgcagtcttgagaagatgcaagtcaatggcctacctccagtactctgaccctaagtttcagatctcctgtctcaagttgtcctacaaaatcttcaattctctgtattctgtacggcattgatattgtagaatcacgagcctgttgtatgttggacataacagtggtaatgttttagtgctgagcaatataccatacacatgacgaaatgtaaaaaaaaaacaaatgtgaaccagcagatttatatgcttacatcatttgcttgcttccttatttcctggaccaattgaggtccagtttgtcgtctctgtttcaagtctaacagttcctgaagttcaaacgaaattaggctcgcaaacacagacaaacatccaaatgggcttctgtttctaggaagcaaaacggagtaagaactaaattataatgagataataaaagaagcccaggaacatcaaggaatataaaacagatggtttagcatgtgaatcattttttagctgtactgacccttcttagaagatataagataacaagactaaatagaacacatgaatggaaaaggtactgtaagaaaacttgattattatccggaggcttacttgagcatatggtgctgcaactttgacaaacgaaaattctggatctaatatgtatccaattcctgccaaataaaatagtcattaatatacaagtggttaccttattatttcggttgcagttgataatagtagagaataaataaataattggaatataaaattgtgaagaattgggctacagcagactaacaagatgcatgacttatttagatatgcatctgatttcctggaacttagattaacaatagatagtatggtatattcagatacaggcagtaaaacaataaagcgtaaagacaaataaaaaattatcttgaagaagtggtagagcattccacgttattaataagagagcgtcaactacaaaaccagcccagaagtaccgaacaaagacagaagcacatatgccccaaaaaaagcaaaaatagaaaataaaggaaacatggaaagaacatgttactgtttcctcagctattacatgagatttagtagaaagactaatatttgtgttcacatgttgctcagaagattctatgtcataattgttagagtatatttggaagtttacatattgtgtttcgtagactgtcatgtgttagaatatatttggtagttcacatattgtcaggaacatagcctaggcgtctaataccatgagaga

SEQ ID NO: 398 - DNA, 631 bp, Zea mays; identical to SEQ ID NO: 374

SEQ ID NO: 399 - DNA, 2477 bp, Zea mays
taaactaaataacaggctacaaagatccttttacggccaacaattaactctattattaaatttgctcttaaatgaagtctatattgcaaattactactcgggttaggtactagagagtggcatgcatgcatccgattgatgggtgacgataggcacgtaagtatttctcgtacgtacgccgctgcgtcagtacgtgtgtagaatgtagataggtatatagtagtgcgtgtatttctcctgcggagtgtgcatgaatatctggtttgcctacagtacagcaaatacagtcagaaagctctaccaagctggctagcaatgcaagatccatcggctgaacctgaccggcagccggctactttcaaatgggagcgcgtctgccgccgggcctccatgccggtcaccaagagtgaacagacaacgagcatgacatggttggagagccacgaacaacgcgcaagtacagatgttcaccctacccatatgcacccatcatatccatgcatgcatgcacggttctcaatcacaggagtcagtcagtacgtcaggagatcctcaaaacataatcaaatgcacaacatcgtctattatatatattggtcatggacttaacaacactgtaagcacgcatgccatcgagcaaccttgacggccccctagttgcatcaagtacaaaattggtagccaccggctaatataccctctcgggggtacccacgatcgaggagagcctgtgtctacctggtcttgcaacaggggctggttgctaccggcagcagctagctttgcgttcctttgcttcccccagccagcttcctccctctcaagtctcgtcaaaacactgcaggggagatgcatggccctagctggaaaaaggccatccatccctctcagggcaaccaaccaaccaaccactaaccagcaccgccaacctctctgtctctctctcactctcactctctacataggattacacttaagcaatgttgctaacaacactgctaactaagggtggtagtaataaacgacataattaacaggcaggacacacacacatatatatatatatagcggcaaggcgacgtgacggcggtggagtccgtccgacatctgtgcatgcaggtccgttacgcgagcggcgccctatggggcgcgcccttccgcctgttgccgagcgagaggacgatctgagggaagaaccctcctccgcccccgccgctcttcttcttcctcgtcgggacgtcgacgtcgcgccgcgcgtggttcctggccgagccgccgttgctggatcctccgctggcgctggcgctgcccccgtgctcgacggggtcttcgaggatggagctgggcgtggcctgcccgtactgcccggggtcgtcgtcgaagcggaggttctcgaagcgcgggaagccgcagcccaggtccggcggcccgcccggcacgtacaggaggatgttggacaggtccccgccctgcatcatcacatggtccacctgcatgcgtgcgtgcgtgcagcccacagctgggtttagcgtacagtaaccacggaaacggggccgtatctaatctaagcgtgcatgggcgtgcgtgtgcatgcaaacgtactactgcgagtgaagcgacgtacggctgattaataacttactaacgtacgtgccaggcgactgattatggcacgcacgcacgcacgcttgaataatccgtcaaccgatcacgctgctagcttagcagctgtcgcgtgcatgtgcatatgtagaagatttttggtggcacgcgtgtagtcttgtatgggtggtggtggtggtatacagtagtagtagcagcagcagaatagcactgtgtaccttgcaggagaggcagcagaagtggaagggctcctggaggatcctgtcacaggccaagcagacgttgccagagcccttgaagggcctggactgcggccgcggcttgaggaagatcaccttggcactgttgatcgtgtagggctgcatgcgtgcatgagaacgacgatgggtcaggatttttaataattcaaaacgattcggagcacgccgcggcgccgtccgtccgtccggtcaccaccgctgcatgctactatccccctttagctagccgccgccggcagcagaaacagtagctggtacgtgacggtccgcgcatcacctggacgaaggagcagtcgatgagcctctcgaggtcgtcaaggcgcaccacgtcattgtacacgtacctccgcacctggcccaacaagtcgagcacacagtcacacacagacaacactacgatcattagtaacatcgttatacaataaatactacggtacagcccgtcacagtacatatacgctgcgtaaaatgatgggtaaatcgaatttacccgttcttcctgcgtgcatgtgaacgtgctgtgctgtgcgctgcgcaacttataacgtgagcaacgcggtgcgtgcgcggtaataattccagcgggaagggata

SEQ ID NO: 400 - DNA, 1789 bp, Zea mays
tagcccacgttaaaaaagctaaaatagcaaatttttcgacgacgatgggctcctcgagcccatggccacgactagcattgctactcgtgacagtcgcatatatgaggaagagactaccaaaatctagactctaggctaactttaacaaggtgacgacgttcgacggtaaatgtaaaaaggtaaggatctttgatatcagcaaaccatgcaagagtactgtcggagagaaaaaaatattaaattctctgagaaataagtgaaaagtaaatttgttgcagggaaagatacaatgtttgatgggctacagtaaaaatatgttgaacaatagaaaatacagtggcagtatgtctaaactacggaaaaagagtacatagttataaatgtttttttcatgaaactaaatactactttgtagtatagttataaatgtttttttcatgaaactaaatactactttgtagttgaagtacagaagagagaaaccatacctctataagttggtagccaaataattgtagccccgcagaaattgttgctattaaaacaatttttagaaatgtataagtgactttatgtagcagcacccatatcgagtagtagcaacagctcgaatgaaaataaactatatgtcagatgtatagaggacccatggtggactgccatctcgaaaccatacaaaaaattcttatgatgccaacagagaacaaatattgatagcaagagaaacgatggaagtcaatttaagataactataaacctttctccatgatcataaattgaatgttgtttaaaaatgatatttgagatctttgggaactcatctccatgttcctgtttatgctatctctgaatgaaatgttcttactcctaatgaaacaacgttctagaactaaaatggccaaaagaggtgtcgaagatcataagtgtataattatcagtataaacctatctccatgatcataaattgaatgttgtaaaaaaatgatacttaagatatttgggaactgatctccatggtcatgtttatgctatctctaaatgaattgttattactcctaacgaaaacaacattctagaattggaacggccaaaagagttgtcgaataccataagcctataattatcatgaacatttatataccaaattgtcactttcaggaagacatttacaatgaaaataatctggtttctgatttggatataacttttttgtattcaagcgtaagagaagaaggcagtacatatgtaagtcatcaactgaaagtgctgttctttacggagaatcattgttataatgaggaaatcagggaaactacatgagtgccaaaaaaacatgacaatactcatattgtttaccaaataaatgagtagactatccatatgatgtaatcatatatggggtccaaaccaaaaggaaatatagaatcatacgcggtttacaacattacaattgtaaaccgaataagtgttgttatttacgaagaatcgttgttgtaaacagaatttaggaaaactacatgtgtgccaaaaagaaagataacagtactcatatcgtttaccaaataagatgactatccataaaataagtagactatccatatgatgtaattatttatgggttgcaaaccaaaagctaatatggaatcatatgcagtttacaacattatgagaacagtgcttcaaaaattaaacaaagactatcggaacccaaaaaaacaaaagaatggtcacctaattcagtaacggaggctgggttgcactaattggattgattgattgtccctaccta

SEQ ID NO: 401 - DNA, 998 bp, Zea mays
tcttgcataaatacttttctttaagatagaaaatgatgggataaaacaatcaagagagctcaaagccaacaaagaatctatcaataacaacaatttaatagttagggtgtgaagttgttatcaaatgcaaaaattttaagaattatatttcgacagtaggtaacgataaagtgagacaacataattacttgaacgcaacaaatctggggaagaatgtttgtacttccagacagatatttgacaatcatattcacaatcttaatataatgattgagaatgtctgttaaagatttaaacaatgtgcttacaactgtcgaaaatagaaaacattaaaaatgatgaaatagaaatatttcacttatgtccttctaactgcttggctctgcgaagggatccactattgttttgagagaaacataaaaagtgtattaggcatgagagtaatataatgagtgcaatttgggggaaggtttgagtgtttgaccctaaaccatcttgatttctcgttgctccaccactactttaagaaagggtaccttctccatattttctaaagttgtaacaacagagatatcagcaagaaaaatcatataaaaacaaaaatgagaaacaatgaaaaagataataacataaaccatagattgtctgatttgcttctcatatagtttccttagattagaaggttgaactatattatttgacgtcgtttagtagcttccataattgtctattcatcagacttgagcatgaagattttgagatttatgacatacatcatatctactactgaagaagacaagaagggtactctactgttcagcctctaatttgggcaacaattccttagtataaccactacaatattcaattgtgtcaacctttttatcaataagcataagtaaattagtcctattaatatgctttgtgcccttgtattactttcaaatttcaagtttacatatatgactttaacgcgacaatgcggacaattttctccc

SEQ ID NO: 402 - DNA, 618 bp, Zea mays
cgattaaaactcttcttagtcaaaattaaatagaaaataatttaatactcctcgatctccaacccaacacagccattggtagccaggatcaactctaacgcacacatccacgaaacccgcgcacatctcaacgaagagaagcgttttttttattcctgtttaatgcaatgtaataacaagtcttatgtacagttgcaggctacaggcctactcccactgaaaagaatcgccaccgaaccatcacgactctgccaccgccagcgccacagccaccacgttctgcccggcatccagttcttctgacaccgcgttctggtcgatgaagttgaacagcgcgagccccgcggcccacacgtcgttgtccatcaccgactcctccggcgagtggctgatgccgccgcggcaccgcacgaacagcatcccgatctgcgaccacacaatccggagcgtgagcgagctgagcttcactattcagcacactagtcaccgccaacctcacattcgttcgcacgcatgcttcgtcttcttaccttggtgagcctggccatcgccatcgcgtcgtgccctgcgccgctcatcagcacgggcgtctcgccggccgccacggtgcgccccggc

SEQ ID NO: 403 - DNA, 2721 bp, Zea mays
agctgagacgttaactccgggtcgcagtgcgtcgctgccgccgagtgctggtgcaagcgacatcaaggtcagactcagttcggcagcacaaactctacaccggcagatatcatgagccatgacaccaagagtgctgattcggtgctcctcctcaccttatgctcgaccttgcaatcgaccagtctgtcatcgcatttctggagaacaagcctcgagaagctcgtcacgatcgtctccctcacttggtcgtccatcgcgcggatgtccaccgtgaagtttacctgtcgtgggcacagctccaaggttcagctgactgatctgagccaccagttcatcagcagggccaagaagagtagtgcttggcaagcttacctggcccggaatcacgttgctcgcgcttggccacgtgttcagctcgccgacggtgcacaccaggccggccagggactcctcagtgaagcagctgcactcctcgtcgtaggtcagcaaactgttgggctctttacagaggcgttccagagtcacaacgagctctgcagctgcaaccatcggatcacggcgcaatttcattggaactgtgccagcatgcccttgcgaaccatctactattacctaggcaaacaaaaacaaagactaagcgctgtaactactttccttctcactcgaaagcttggtatacaaagggacttggaagcaacccagaattattaatgacagttgtcgtgggcagcttgagtatttaaatgtcaatgttaaactgaacaatcttggtgacagcaatgcctgtcttcctgaacattaattaactaagacttgttcttgcatcaaagatgacacatgacataggtgtgccaattattgaatgagatggatgttgactaataccccaggtgtttctctgattgattgtttatccattacatgcacatacttggttaacttaatattgaccactcataccctttgctaagagaacactcctatctagaattatttgattgcttacctgttgactgctatactgtcaccttatggttatctaatataaccggtacttcttttttctcagacacatatagtaggctctgatattgattgttttataaggaaagaatgaccttacggtaggaagccatgcagctagaccatattttagttttgtaaatgtagttcttgaatagatttcacaagaatagcagagaactccgatgcaccttcaatcgtgtctgtcctgcaattccttttacaacaccaagtggataatgaagggcttccaggacagggccttgctccatgtgtacctacagtttttaaaaatatatatatgtgatgtattctgtattaccaggcaactacatgaaaaaaggcatacgaaggcttcatacctcaacataactccccacagactccgggttgtacctggcttgactaatagcagtagaggtagcctcaaaagaattcattttcagaacatcttgtagtgtagtgccactgatgaaactcaatacaacaaatgaactgcatcagagacagttctgtaaaatagttcggttggttcacgcgaaaaagacaacacctcttatctgatacttgtaaaattgattcaggtagtgtaccagctacagcagcgcttcccagaaaagttgtctggaatctgatgccctcctcatcgctgaatgcaatgacctaagcttcaaaaaggaaaaatgagtgctaggctccgccatgatgatttttccaggtgacgataatgcaatctaactaatgctgattcataatttgataaaaaaaataatcttcaagccactttggattagagcgttgaagccatacagtgaagaataaaccatgatttggttcacaccaaaacatgccgaccttgatctatagatgatatctagacatttgtttactgaaatgcatgacacaacctgacaacttgtgcattttgattatcaggattgccagaataacaaaagatgaaccgtgcacagaatcttttcaagatctgtaggaggtacgtcgaactgattaaaggggcattataaaactagattcctccaggtttctatagtctttcctgattatattatgatagtaataaagaacctactaggtaccttgcagcttagctatccaatcagcatcaaaagtacaatatataattaaaactgagtaaaatataataactctatgcctgctactggcaataaaacaatgtgaaatattccaatcaaacaaataaaagagtagatggacacaaacaagatcaatgcagacaagtgcgggtctacaagacgtatgtggctcataacgccacttgtagagagcgagaatagtataaggccattcacaagttgcggtggagcaaagaaacacatttaacatatgatactatagtaacatctttagtatactggaagcagtagagaattctctaacctccactggtctcgttaacctctggagtttccccgtaactttcaaaaccttcagtgctgagattgctgaaataatacccaaggctccatcgtacatcccagcatcaacgacagtgtcctgttttttgaacaaggaaaatcgtatcagttgtcgcaatattggatcgccatcaaaacactgaaataaccggatagaggaagatagactcaccatatgagatccaatcaacaaggcatctctggtagaatttgccggctcatatcgaccatgaatattccc

SEQ ID NO: 404 - DNA, 2851 bp, Zea mays
cttatagagggggtagagataagatgtgaaccttaatgaatctaattgtttattttctttacgaaatttatcttgttttgtattttaccatagcattagcacggacacactactagtgtgagaaacagtgtagaacatacaaaacttaaattttatggtctgtatcactgtatgcataaatcccagatggaaacattgcattttactgatgcaatttcatgtgctacataaacactataacactcagatggggagatgacatttttttaattattcaatttactgatttatgcatgaaatcccagctggaaaataattcaagtcgatctttatggcagaaacaccacaaatggtatatgtaaccatgtcataccagccggttgatctagaaacctgtaccagtactagtatagctatatggattatatgaaaattccaattgccaaactattgctttatagtagatctttgtacaaaaactagctaattctgttcaacatgtctatcaaattgacaattaatctcatctttacgtttggaggatgtagcatcaaggtatttattatcaacattaaataaagctgtttcaaaagtttccaattattatcatactcaacactgtggccctttgctttcctgtttctagtaggatattaagtttctgccaggtcaattgaaggcaacaaaatgttaaaatggtccgcaaagatatgaaagtgcagcatacatactcttttgagaacgctgaccctatcatgcaaactgtccagagcttgatcattctcatgctcatgaatttcacgagaagaataagctggagctctcaccccaccttcttcaatgccatcaaataaagcagctctatggctacggaagtccctgcaaataataaaaatggataaatgacatcattaccattttgctaacaaccaaagcagtgcaattatctactggttgtctgtacttccaatgactgcagaaggaatataggacaaagtagccatttttcatggcatccgcctattcttttctcagttctgtataaaatagggcactttgtagatgtctagtctcatatcttatgtatcttgtcaaatttaacatagatggcaagtaaccacaccttttgcttagatcattaatggagaaaaggtaactttatacaaagtcattatcacaaagccgatatgaaattgacaggaaagagtggtaaattggaaaattaaggatgaggtacaatctaatgaggaaactggaaggctgtatgcaagcacttgctagttgctgctctgttaattttcttgaattacgattagactgcaattcaccaattacacagaacgaatgcagagcaattgcagtaggtaagttaaactaccagtagaccaagacctggcacagtgacagtcttaattagtaagcctgtgcaattagatagtatcgccattggcttgcaaaatgactagtgttgggaaatcatgacaaactaatgaaaacaacatttacaaacattgccacaactgaatgtaacaatgtatttgcatgtaaaacaaaagaacaggaatagacaagcttaacttagtaaggggatgaaacagaagattattatatcctacacaactgcgatctaggaccagaaaacaaaaatacagcatttagctttgaattagttcaatgaaaatgacatacgactaaaacttgtctggctgccctggagaagggatcatacatgatggtcaatatttttcgtggatgtgcatatttcataagtggctcaggcagcacagaattcaaaagtaatcaatacatgcaaggaaccgaagaatcaaaatcaatacatgatggcggtcgattaatggaaccgaagaaacaacccaggcctagggtaaaactaaaatgaggactatccatcagaattcaaaactgccaaaaaaaaaactcctcatggtcatggtttgacagaactgactgctaaagtggggcttcaagaggggtaaatggcattgaattcgtaattccgggaaaccaaccactggtaccgggaaattagctgaggcgtcacaagaacaatgggatttacttcaccaggcacaaagggacaagcgggggcgcagcagatagtactcagcaggtcaggtattggaagctgggtaacaggatccaccgtatggtgcaacgaacggtataaactacacagatttgcatggggaaaattgttcggcaccaatacggcaataccacattacttcgcgtaaaaaaacgccacattcctaaacacgcaagctcacgttatgacatgaacctgtaaaaaaaaggcggaatagttcgttctacccactaataacagtcgagatagatagatatgtcctggggattgctcgctagggttgagctattaaggatcctgaccttctcgagttcatcggacgcgaccttcactggccgaagagttctcacgggtgcggagaagccgacggagcctgcctgccggtgtgggtgggcggcgagatctgatgaaagcttgatgcgcctcctccgtccttctggagcaagaccacgcaaatggggttggagtcagtgggcccaaatcgtaaccgatattgggcgggcgggcggacctgcgacacctgccttccggttttcgggttgggtggcaaccgtggcatgcacactactgctacagatgggcccatcgcctgtcggttacggcccatttcaatcaattggagaagatcagaagaagttccatttctgcgcggcgaatcgcccgccttggcttccggcgatggacgccgccgggtggcgggtagggggagccctctcgcgtccaagcaacgcagtctccagcccc

SEQ ID NO: 405 - DNA, 536 bp, Zea mays
agaagagctgctggaggtagcttcactcttacggtggcattgctgtccaatgatgctgtgttggtgctagtttgacatcggctacgcccaacacatgctcgacaatatacttcatcagacacgtatatagtatggcacattgacatgtcctgtttggtacaactgctgtttgcagtttgttggaaaagcagctgagaagctcgtgaaaagcagcttgcttattatttgcccttagttcatcagaagtgtttttatttggtataacttctgtttaaatttataaagaagctatgaaataggtgtgccaaacagggtatgaacttcagtgtctgacaactagatgtctatcattgcctgcgtcttattgtggtcgaccctgcttagcatggagaagctgcttatgcgctgttcagcatatgacctgctgtgaaacgagactccctccctcaaaatctgtaacttagttgggtgacttttcaataagaaacaatcaaaacagcttatcctgggtgatatacggcttgctctgatagagt

SEQ ID NO: 406 - DNA, 1564 bp, Zea mays
ctaaatactaaaaataacccacaaaaagaccagactaaataatacattatgggttattgctgtaggtaagactgaacgagaagtgaagttgacatttaatataaacacgaatttcactgatcctattactactagtttacagggttttatagtttacatatgaagagactttcgtcagaaaagaaaaacttgagtctgcttttagttcccctttcttcaggttcacataatgttcttgattttttgagtccatactttattaccaccattgttatctttttgggaaaaacgagagagataagcaatggctaaatatacttgcttacagagttaaacagatgttcagtacaagcactaaaattacaattatacactcaagaaccttttggtctccacataacagactgaaatgcaataccgttacggtctatttcgtttcaatcttctatttatctgcaccaaatgatgtgtttcttattgaacaattccaatttaattcttctgcaggaatcatcatgaagaaactaggatttctaaactacaaaagtgcagtttgaagttttagttatgagtacatcaacacacagcttcttcagtaactcaatgcccatgctagaaaacttgattgacatctgtaaggtattgttaccaaaactattcaaacttgtacaataactatcaaattcctcgttttgtcaagcattgtccagatatgcaaaggctactgattgaagctcatcaatatcatgatacccactcccttgcgtggtccaagaaggattgctgttgttgtagtagtcaggcatgcatatatctggctcataaccttcagaatgttgagttgacgttgatgtgaagcaatcgtttgcaaagtataactgcctctcactctttactgaagaattgtttgccattgttggttggtaaaagagctgcccgtcttgaatataaggtgctaatctttcacagttttctttctgagggtttgatgtcaaggacccatctccacatccttgtattgctagagctttgaaagactctagttctgcttgcagcctgaccacctatgaaatttcacaaatagtacactttgtaaatgttgatttctttgcagtgtgaattattatgattgagagacctttttaaataatctagaatactataaatttatgcattgttaaaaaataacgaagtagcggtctcataataagataggaagatatgtttattatatcatcacacttagtggatagctcttagctgcatttatgaaattatatgatactccaaaactttttcatgttatagttaagtttgttgtaagtgttatttcctatgagtctacagattgactgctcgagtgacatttaccctttctatattgaatgtgaaccaaacacatcatttatgcataactttatttttggaaatgagtgctaatgtagaatcttgttacctgttgttgcagagaaaagatgtgagcaacacagccatatattggatcttgaagcctggcttgcgcctcatatgacatagtgactgcagcctcgcaacggtcacttat

SEQ ID NO: 407 - DNA, 870 bp, Zea mays
ttatggatagcagcaaagtgcgcagccccgtgctcatgacagaaatatggagcgaagacacaccccttcacacacttcctgcgtaggaacttgcacgcaccacatggtgagccaaggcctgtcatcttgggtcttcttcttggtgctgttgttagtcttatactcttattcttactctttgatgtgaatgctatgaatcatggggtcatcattctctgctatttatagagactagcttatgctgtgagtaactcagtatattgaataattaatttatcttggtctccctagtggactacaagttcaattattttaatcatggttgttccactctgaattctgcttcagattccttccagagtggttaaatgacaaacgatgtaacactccaaattacttataattttcttgttgattgtttattagttgataaactttacattcatctcccggactagggactatgcaggagtggtagttgccatttcatcaagaggatggaaaaaataagagagaggctgagacatctccctgaacacccattttctgataaactttactcatatccaagttatgtcttaatcttacttccttctgctagttcagtaaggacagaaatatcaaaatctgctgaacattttttttcatatgttgttgtcatctctaagtacatgcttagaagcttggcattttgtccccgagatgcatcacttatgattagattagaattagataatcacttcgcataaagtttgtgtaccacctatatggctaaacgggtggacctctcatgatatttattctaccctactaggctgcctagaccatcacaattcacaaatattagctttactcaatgtcgctattttt

SEQ ID NO: 408 - DNA, 550 bp, Zea mays
cgggtagtacaacttaaatatgtgccgttttttcctagcaagtacaccttatcttgcagcattgtgataccactattttttaaaatgaaaacaaatatgaaaggtgtggaccaatgacatggctgcctagcatggtggcgctgtcctcgtcggcagaatatggcaacgtgccggctccttgttgcttgtgtacgctgcctagcttggatgtcccacacgttccacacgctggacacttgttgtagtcgctgtcacgctcttgcctcgctccttcccggctacattacataacggatcggagtgtgatgatccatcgatggagctgtgagctgagctgagcttaccaccaccacacacgggagatagctatagctagcatagccagtcagcgacttagcagcagctagctagccatgctgccgtccttcgtgtcgccgacggcgagcgccgcggcctcggtgacgcctccgccgcggccgataccaggcagctacgggccaccggtgctgggcccgctacgggaccggctcgactacttctggttccagag

SEQ ID NO: 409 - DNA, 1797 bp, Zea mays
accgcccaccttccccttcttcgtgggcgtggacccgcgcgtggtcgccatcgtggacgccgccgccttcaccgcgctcttcgacccggacctcgtggacaagcgcgacatcctcatcgggccctacaacccgggcgccggcttcaccggcgggacgcgcgtcggcgtgtacctcgacacgcaggaggaggagcacgcgcgcgtcaagaccttcgccatggacctcctccaccgctccgcccgcacctggtccgccgacttccgcgcgagcgtcggcgccatgctggacgccgtggacgcggagttcggcaaggacgacggcagcgacaagaagccctccgccagctacctcgtccccctgcagcagtgcatcttccggttcctctgcaaggcgttcgtgggcgccgacccgtccgccgactggctggtggacaacttcggcttcaccatcctggacatctggctggcgctgcagatcctgcccacgcagaagatcggcctcgtccagccgctggaggagctgctcatccactcgttcccgctgccctccttcctcatctggccgggctactacgtgctgtaccgcttcatcgagaagcacggcgccgaggccgtggcctacgccgaggcgcagcacggcatcggcaagaaggacgccatcaacaacatgctgttcgtgctcggcttcaacgccttcggcggcttctccgtgttcctgcccttcctcgtggccaaggtcggcggcgccccggcgctgcgcgagcggctgcgggacgaggtgcggcgcgccatggtgggcaaagacggcgagttcgggttcgccaccgtccgcgaggacatgccgctggtgcggtcgacggtgtacgagatgctgcggatgcagccgcccgtgccgctgcagttcgggcgcgcgcgcagggacttcgtgctgcgctcccacggcggcgccgcgtaccaggtgtccgcgggcgaggtgctgtgcgggtaccagccgctggcgatgcgggaccccgaggtgttcgagcggcccgaggagttcgtgccggaacgcttcctcggcgacgagggcgccaggctgctgcagcacctcttctggtccaacgggccggagacggcgcagcccgggcccgggaacaagcagtgcgccgccaaggaggtggtggtggacacggcgtgcatgctgctggccgagctgttccggcgctacgacgacttcgaggtggagggcacctccttcaccaagctcgtcaagcgccaggcgtcgccgagcgtggcgcaggcagcagcagccgccggagcgcagcagtgagtgcgctgtataggatccatcggtggcgtgcgacgtcgccggcgccggcgccggccaagcaataaagtaatgagtaggccctcctcgtcatccacatgctcgtctgtgttcgacttcgatcggtgtctcttcctcccggccggccgctggccgccaaacagccgttgtggtaataaaaaaatcatttgtggaattgcagagtgtaccgtggtcacacacacttgtacagtgaattctttagtgacgctgcaataaaattgaatgaacatgtactcgctcctcgattgtcttgttgcttaattacctccgatcaaactaagaaaaactctgaacccttgacttaatttttcatggcttgtttcatttcttgttacgctaaggatagatcatgaagaaccaacaaaacccaatatttacagataaatcatagaaaccaccaaaatgacaggaagtcacacccaacgttcccgtctcagataaactgaatt

SEQ ID NO: 410 - DNA, 2808 bp, Zea mays
catagtgactagatggaaattataagttgtagttagttttgtaaaaaaaatagtttgcataatttatcctgtcttatacgtccaaatgtcataacattaaaataactgcttacaggctgataattgtcaaaatgcacgaatctactaattaaaagtttttttattttcggtggtagtttcatttctaacatgtcagcaatttggatggtgtggcaatcaatcagtgaagaaagagatgaaaccatgtgtacactattacctgggcatattatgtcttgcatgttacctaaaataatgcaccaaatgaaaatctccgctatgagagaatgtttcaaccaagatttcatttcttttaatttgtttggactttgtaacttttgaacattagttttagttttttttttaaaaaaaactcctcgattacgttaaaaaaaatcctcgaagccaaaaggtcacttcggagcattagtttttagtttttttagacttagtgtgcttttagaattttgtcttataatagctctttagcttttaaaagatcaaacaaacggcgatagaataggagatcacacaacagcgcatatttagatttttataggataggatacaagaacacaagttacttacataaacaaattggaaaaggaatcttcgacccggttgcattgaacggtaatgcaggtcgtaccatgtgcgcgaagcctgaattattggcttaattttagtccacaacgactcaaagcatcacgccagccgcacctgcggaccgcggcgctgtcctgtgtcttctcctcccagtagcgtcgccatgatttacgcaagcttgcagaacgggaggccatggcagcgcgcacgggtatgatggcccgacgtcccggttcctcacgtgctcattttccacctccatggtctccaggtcgacggagaagagccaggttttctcccccggcgtcagcaccacggaggtattgtctgcagcgacaatactcgccggcagcctaaagaaccagtattcccaaccgggcagattcgcggtcgcgtccctcagactgatgctcctctctatcacccactcgccggaatccggtagctgacagaacacctcgaggtcatcgccgtccaagcgcacgacgcgcaccgtgtctccaccgtccacgccaccaatgacacggaagctgatcctccgattcggcagctgcataggcgccgggaaggcgaggagcgagaacttgagcgtgctctcgtcgagcacgagcaggctactggtctccatcccccagtagaccttcctggcggctcgtccagcaaaatggctcctctctatatctgggacttcaacgtcgtcgtcgttcatggcgtgccaacatatgcgccacccgccgtcgctacctggagtaaacacgcacgcccgtggcgtgcagaactggtagcgccacctgctgcgctcgtagagcacggatagcaccctgaagtttgacatggcgtcgccggcgcaggttccgacaccatctagcaggaaggcgccaagtaacgggagatggctgaggtcggccgggcgcgcgatcccctgatatcgccgtgacacgggctcgcacacgatgaagtcaggtgaccagcgccttgggtctatggactcccaccacggcgtgctggtcaggaggaggaggctgccgcggctgtcgacgatctccctgctctggctacgccgtatacggctggaacggttgtcgtacatgtacatgcggcgtgggcggtcgccttccaccggcggagcgtataggaagtcgagggagaagtggcccgcgtcgacgacggccggcgacgagggcacgaaggctgccggccgtttccttgccggccggccccaccgccccgtcgcgtttggaggcagcatgtccgtgacgtagtagcggccggccacgggcggcgcgccgtggagggcgcgacagcaagccaggaagcctgcgccggcaacggcccggcgccagcgcctgcacgtggccgcagcgcggatgaggtggagcggcgagccgaggttgaggagcaccgcttcgaggagctcgtcggggaggtcgtttacgctcgtcggccccgcgggcagcttgctcctctgtttggccttgaccttgttacgcttacgccgctggcccttccccattgacacaggaacgtgcgcactctggttggcactcgagaagatatgctaaactagctagatcggtcctgttccattgagaacgaacagtgtacctctatttatatatacttgctcggttgatccactcttctattgtggatcatttttgtatccaagctatttttttaactctctaggtcacaaatttgtcactctcttgactaaaatctcgtgtcaagctttccaaactttaacaagtttagagattcaaaaatgacatcgctagacttgtcttgaaaagaacttctatatttacatatatttattagacaatgtagctataacttaatggcaaaattatggccaagttgcatctcaaagacaaaacaaagccaaaaaaatgttataagtttttcatcgagattgagtacacatggtatggtacctaactaattgagaatcaaagttgctatttgaactaactatgaaagaaataacatttttgtgatcgaattagattagcattatgatgtatttggcacgaactaactatgaaagtcattcaagttttctatatttggctagcgaggaacccgaaatagaagatgtctatatttgaatagtcattttcataagcagttagagggtacgtacttttgtataaaaatctc

SEQ ID NO: 411 - DNA, 1495 bp, Zea mays
ggtcttgtcacgcagtacagacccaattgcttttgctgccaatggagaccccacacatctctcaacgattcgatcaaccaactcaactaaatcatctggcttgctcctctgcaatccgaatgctcttgtttctataatttcttgtatgtattccttgcccaagattgccacttcatggtaatgatttgtccatgagctgtcaactacagcacccataaactcggctacttgtttttcacgtgttgtcactaatacggcgccatagacatcttgtgtaagaaacgccttgatctttctccacttgtcaaagttaatatccttttcccagacgtcatccaatacaagaaggtacctgataatgttttttcattagtacatttctatctggatggccctaaagcaagcatatagcctatacattacaaattgctccctccaatccaatttaagtcacactagctttgtattaagtcgatcatatttctctagcttcaatgacttttatgaaaatatatattaacatatacaaaatacctaacagatttactcaactgacatattgcaaggtgtgtggcactcaactcaaagagagctagtggtcatttgcatatataatagtgtttgttgcctggttaccagaaatgtttgactgcatcagcttttgtgtttatgctatatatgtagtctatagcagaatataatacgatctttttctgtgggcagatcatggcatggtctgagaggagatgaaagtagttatgcagactacagaccacttcagcagaattaagttagagctaatgttatgtttggaagggagttgacctgtatacttctctgtcaacataattcaagcttccattttggaaccatgttgtacttttacgtgattccgtacttgtagaacacagtaggaaatatatcttacatgtgaatgccaaaagcatgagtgcggtaattaaagccacatttagttatgttctaatttaattttagagctcgcacataaacttgtagtaaatatcagcaaagaagtccattaggtacacacaatatgacacgatgtaatgagtgtttagtaaataatgaaataaaaacatcatacaaggcaaagaaagtaaagttactaataactaataagctccagccaatacctctttccgttaagatgttcttgaagcttcttcactgcttcctcgaggtctctctctgaggcattacatatcttgttggcaagattaaggacactaaaatcatctgacacacatacccattttcgtagatggaagtactccttgacctgagggtcgttgtggatgagctgagcgagggtggtcttgcctagtcctcccattccaacaatgggaacgaccataagatcaccaccgacaacacgaccattggcattgaccaatatgttaaccattttgttcctctcatcatgtctagacctggcaacaatatcttcatgatcatcaatgaggaaatccatctc

SEQ ID NO: 412 - DNA, 1209 bp, Zea mays
ggtccttgaaggtgtcaacaatcctgcgaagcctatagcccatcctactacggaatgcaacacgattgtgcgtaagagttttaccctgtccataacgccaagctcggtgatgtgcccattctccttggcccggcggcggagcacctcgtactcgaagtcatcaaagacctcgtgtgccttgtacgctgccgtcttgacctgctcgagccattcctgcacaccgcggcgaggcccctgcttctcagcatcaacgatgaccgcttcgatggcttccaacctgagcttgagggtgtcatagttcttctccatgccctccatcaccttgtactggtcggtgagaaggctgacaaccttcttcttcaacagggaaaccactggggcgaccaccaggctggtcgctagttcagccattggagcaaggactcagcagagctttggagcgttgggtggagtggggctggagtggagaagatagaagagaatgtaaatcgctttggaggaaagcacagcagggcatctttggtttgctttactcaaagaaaagaaaaggcagtgcatctgtttcttaatatcttatcgctggtggaataaatgtactctctgctatagtggcaaaagaataaactgcagttgcagcacaacgaaggcatctaaaagattgaagtatctatatattctttccttcatgaacagaactgtatatgtatagtgctacacagcacagtgaacatgctgcaagtactgtgtgcacactgtgtcaaccacacaagagagagagaaacaaaaacctgactaagcaactaatgcgacgcagtccatgtcaagcaaagtcatacatccaaagttaacgtacttatctgtcttcatttattctctgtcggccattgtgaaggtggttgacaggttgtgtggtcttatatctgtctccacttattatgtctccgtcaggacagcccacctcttcacctgccagccagatgataaactcgatgatgaggaaatgagttgggattgtagaaaaagtaggacctaggtagcacatgaacacaaatttaaggatgtatttgtcattttaaatcttaatactttctttgtttcagaaagaatataattctgggttttacacgggctggactttttaagttatagttaaacttatacaaaatggtatcaatatttatatctctaaataaatgtatgcatatatat

SEQ ID NO: 413 - DNA, 2788 bp, Zea mays
acttgtgtttgttatggatgacatggaagggtgcactaccaagcgggatccgcagaccagtgacctggagagagccctgtgcacgtggcatcagtttgtgggactggcgagcgaggcccacgagcaacaagcgcgagatccgtgtgagagatggtgggcggctgaggcatgggccgtacctggtagtgaatgtgggcgagcatgtgtcttggtgaagctgggtttagtggtaggtgaattgagccgaccagcttccggcccatgctgaggtaagttcttctcttttcttttcctttttattttctgatttcatttcaatttcagttttaaatcccaaatttaaatttgatcttaatctcaagtttccaattatatgcagcacccaaagatccagcatgaaatacataatttaactttatttattttattatctcattttgtccattaatcacatgtttttcaatatgaaacacatatacacaaaatactattctagaaaacaattttcagtatatcatatgaatactttagtgaatatttataaatactaaatcatcttaaataagttaatttgtgtaaggatcatttatttagtctctactaagcgaaggtaacacaaaatctatttaagaacagtttgccaattaaacatttgagggtctttcttatgttatcctatgtttttctcaaattctagtttcaaagtttaattctaccagaattttaatttcactacttatttactttagggaatatactttataaagaaaggaaatctattgttaaaaggtaatttaacttgaatcttttggagaaacttttataaatcccaaaataggattttgggtgttacaaccatgcatatggtgctactgaggaatgatctttagttctggttcctacaacgtgtttaggattgcggatgtctaagccaccatgttttctcttgatgtgcacatggtactatagagaagtgacctttagtactgattgccaaccccctctagtttcgcttttggtaaccaagactctgcaattgagactttagttctggttctcaatcccctttaacatcgattatggtaacccggattatgcaatttgacaaggacatcacttcttttgatgcattacaagatctgcttacaagagtacaagcacgtatggtatgaatataatattagcctcggtggtgctgtaaatcatattctcgtgacttcttagaaatcagaattaagatttcatgatgtagagccacttaggcgattgtcaagttatcatcgtgcctcttcgcaatgttctttggctaggcactggtcaaatgctcgcggtacagtcaggggcaaatgtatcattatgtgtgtttcttattcttatgtgtgcgaatatccttcattggttctatctctctaactacactttgctagtcattagagatgtcagcctcttcttcttcatccttgaggttgatgtcttttctcgaaacaaagatctcctaactatgattatagttgcacgtgacaataagagtgctaggtttagttgtcaagatagatgaggcagtggctctggctttgtatggcaaccaattgatgaaggcaactatgcaagaagaaggagaggtattcccattgagttcgactcttggctaccgtttaatccttccttctattatggaagtaagtgctaggtgttgggtgctttttagtgagaccttttcctcatcatcccttctcaggcacaagagtgaatgcgataagtattgtaatagctttatggtacaatgaagttatattctcaagtccaagaagtagtatgactagacctagaccacaattatctaacggtttagaagccaagtctaaaaacttggtcgtatttgagcatgactcaagcatgttgtgttggttttttattgattcgggttggagttttagttttttttcaaattttttgacaagatcatccaacatgtcctaacaagaagttggaggagctcaaattggcctgatcttaacaaggtgtcaatgcaacatactgaagacgtgcatcgtgcacaccaaggaatgaatgtgaaggttgatcatgcagagaacatgacaaggtccattgagatttcagtcgtcttttgcaaaaagttcctacctggtccaccagctattagtgtgtgacgaccgacaagtccaatatgggattacccatagtagcaattgatgggcttcaacataagttgagattaattgatgatgaatgtgagataacaatttatacatggtcaagacactagggtgtgtaataccctacatcctatgtggcaataatgccttgcattggattatttattatgatatatgaacaagagagtactcatgtctccctttatatagtccacatggtaggcatagtcaagtcctagtcaacaaagacagttctaatcctattacagaaataatctttcctttagtcagactaggttgatagcctcttgctcaccttgttccatatcttcagacaacttcatggatcaacccatcttttttcatgtagtcggtcatatggaaaacccttaatgtagtaatctaaaaatcacggagccaacaatccagcttccaaaacatttttttcccaaaaccttgcttagtgggtagaaatactaagaacgctagatgcactagtgtaaccctatctagatgtgtcagcatgtgcattaaacaacatgagagttgccttttattttattctttgttaacaacatgaggtttagggtttccgttttcgtattttatca

SEQ ID NO: 414 - DNA, 1060 bp, Zea mays
actcttactcgtgacgaactcgcgactgagactcttcagaatttacactgaggatgtcttttagtctttagcaatagtgagaatagccgtgcaaaacactgttttatctcatagatacatgatttatagagtaaagtttaaaatacaaaaatataataaaagatgtgataaaaaagttgtcgccgcccaagcaagtccccataaatttacaagttttttctattctttccttgcaaacccatctgttgtaaccagtggtggatccagaaattgatgtgctactatgctaactaattgtgacattgctggtctaatgatagacagctgataccttatagtatacataccgaaatgtctgtgtcggatgggtcgtctttacgaatgacactaaaagtcattaatatggtattatatgtgtcatccacttaataaagatggtaaaatattatgttgctatgttagataatagtgtggatgataagtggtgggttatcgagtgagacatttttctatataatagagcgcgacgcaaactgtcaaggataggatgtccacgtatgctctatttctaccagtcgtcagattttggatccacggtgagataagagcgcggcgtaaaacggtacggaccacagctagataagcctggattgtcctcttcagtgttgcctttcgtgttctctaccagacactagaatcttccaatgtaagatcaatatgtgtccagcgtccagaaatttcgtcacatcgcttttatttacagcgaaggcatggagccgacgcttatcttccgctcccttccttactcgccctcaacacgcaggccacagtggtgacgcctatgcttaacggcgccaacgactttccctcacacctcttgcacaggcgcaagcgcatagtaggtttctgcatcacccatcatcttcctcgcaacgacgatgctcatcttcgcccgcatcctttctcgcgctcggcacacatgcgacggcaatgacgctcatgcttgacggagctagcgacttcccctcccgcctctcacacaagcgcaggcccgtggtac

SEQ ID NO: 415 - DNA, 591 bp, Zea mays
gtttgctgtcgcaataaatgtgaataatttgcttcctgcaactgaaatatggcagcaattcatttggacaacctacaacttctattcagaacaaatagtatggttttgcagtaaacaaatggttacctattcctttccatactcaccacaatacatgtcctcctagacctatagaccataaatctcatgtttattattctgccaattaaggtgtgcttgctctgccaattgaagtatagtatgtttattccatgttcctccgcacacctttatatttttcctatttgtgtttcatgttttactccatcacccatgtttcattgaaataactaactgtgcatacctatttaccacacataaagttgatcacttcttttgtgagaggtcaccattgctgctacaataggcatgaccaccatatttcctccatacatcaccatacttttccctctatgtacatgtagatacacacttcggataagtgttcaagtacacatgattgacgatatgctgttatccataaataaacatatgaacatacatcatatactatgaatgcacatatatacggcaacgactaatatgcaagca

SEQ ID NO: 416 - DNA, 632 bp, Zea mays; identical to SEQ ID NO: 322

SEQ ID NO: 417 - DNA, 1247 bp, Zea mays
gtctaataccttagttattcctgtggacgcactcagttattctctggtttcttcccttcgcgtcctctcccgccgccgccgccgttgaccagatgggtcgcgtcatacgcgcccagcgtaaggaagccggctccgttttcaagtctcaggaggactggtcgtctcagcgaacaggctgcctcagccgcagcaaagtccgacaaggccacttagacaacttttgcggttgtttcaattacattagttgatagtcttctttgtgataaaacagttaaagctaaatatcaaaatcatatcaaagaagctgtagatttctgaaattttgattaattttctttttagcaacatctgcaggcactctgtttccaaatatgccgagcatgacaaggagctgcaaacccggtgcagcccacaactgaaaatccaacaagttcttggcctgctctgagaaggttctcccaagtccatcttcaaaagcttcagcagatgaacaatatgtcaaaatgtacgaagtgctgaaaatagtatctgaaaagtttcctctgagacagaaaaataaaggtggtgctagtcaacagaccaatgaagtacctgctggacaacagaccaatgaaggtggtgctggtcaacggaacgatgaagtacctgctagtgttaagagaacctatttcaccgtgactaacattgtaaagttggctcaacattcggataacgaggagatctccatgcacatggacacagatatgctcgtcagacattttttcagtgtggtcttaaataacctgctactgccacaaaagtctatttttatgtaacctcacctgaacttcaagctgtatatgacctagaaaagttgaaaaaggttgactggtcatatgtgatatttcattcattaaagaaagctcttgcactgactttaagaagaatccggggcatatgaatggatgtgtccttatgtttctagtaagtaccaggataatgcagagcatatccataattccttaaagtaattgtttttctcatgttgggtaggaaagtgactaagtgaagaatcgttggttcacaggttgttttcatggactgtattcaaaggaacagcttggacacaatgttgcagaattaacctgtatacggaggcaatggtcgataaccttttgagtgcaaaaccaattaagaaaatcagtaagaggacaaaaagggtacgaaaaggaacctttaagacattttgactgcatctgattgttgca

SEQ ID NO: 418 - DNA, 1232 bp, Zea mays
tgtccctttcagctggctgcggaggaaaaggaaagggcagcagaggcacagaagaaagtgatgttgctggaggatgttgatgtaagtactattctattattgttctatgaggtgatgcggaagtgtagtccaaagaaactgactgcacccccttgatgtcctttttagttgattagctgggaagatagctgcttcagacaatttgcagtgctgcatgagaagtcttcttgtaagaggtaaaactagaataattgttaattttttaacctctattgcaaatttacctaacctctgtttcaacttttttagcatcttgacataaatgatgcagatagcatatacaagaagcatattttagaaagatcccacaacagaattgttttagactttccttcctgtgaagtacgggaatctacttttattaattgtttgcaaccatgtggtcatatgcattcccttgtatttcatttggtatgcgaactatggtcagtggggtggcatgataaaattattcttagtgaaggtgctgtggtaagtacttttacctatgattgtcatctcaaacttagttattgttattctttaactatggttgttgtatctttgattgttattccagaatgatttgttgaataaagacataataactgctaaaagtctgaacagggagcttactccaaataaagtgaggtatgtgaatcaggtttgtgctctttgtatttcaatgttactgggaaagctctgtatttctcaatgctctgtatgtctaattgttttttccccagatttttgttcctatagtttataatcatcattggtcgctagttgttgtttctactgtgcaaagaaagatatatgtccgactcttgtcgaggcatatataaagaggtgccaattacgttgcttgaaaaactgcagacgtttttgcaacgtaatcacatggacatatctggttatgatacagaaacactgatggttcagcagcaaaataacacgtaattgaacgtacaccaccttagtcttgtagcctcctccgtcttgtcatcttgctttataagaaaaaaaattgactgaactactgctaggtttttctttagcgtttaccatgctatctcctattttcaaccttgctgcttcctgtttccaccatctttgatctctctttctgcgaattcttgcagctattactgtggttttcatgtattgttgttgtcatgtacgggcgcaagtat

SEQ ID NO: 419 - DNA, 972 bp, Zea mays
actgctggaattagatatcagagtgcttgctcaaaaaaacgaagtcctgcgtgcgtgcatgaaggtagaaggtgatattttggtcgcgttcaatagttggcacaagtcaatgtcttctttgggttatacatagggacatacagaaaaatgatctaaatggtacgtaacagcactgtctaaattaaaggacgtaaccccaagccagcaaatttggaatgaagcaaaatccagcaatgattatgtaccatattgtgtgtgtgtgtgagagagagagtttggctctatgtatgactctctaatgacaagcaaccttcgtgtttttatagaaaacgatatgccatacaagtgcatccaacagaagacaactgttacaattcagttcagaacttcagatataacaaatcactgcacgatcagtagcgaaacatgacagctcaggttaacaccacctaacagcgacacacagaggcaagcatgcaaaatgaaaactgagctcgaacgcggccgcatgcatgcatacagaagatcactggaacacgtttcttcaatgcctgcctcgggatttcgccctgctggcctcctctggggtcgacgggaacagctccacgtacctcgtcccaatggtcatcttatccttgcacatggccgtcttcgcgacttcagctgtcggaaactcaacgaaggcttcacccgtggccttcccatcggagcggtaggcgatatgcacgttctcctctgccagctcgtactccaggaagaacttgatgatgtcctcagtggtggcagagtagggaagcccgcggagcttcagaacctctgtgtactccatgctgcccttatcttcagacggcttcctaggcctcggaggaggcggggagcggcggtactccggctcgaaataaccgccctggttcacctcattggctattgcacagtagtactcgtgcttcttgcacctgaacacctcgacat

SEQ ID NO: 420 - DNA, 1616 bp, Zea mays
gagaaaaaagaaaggagaacaacccccatctctcaatcccaatttcaaataataacctgaatgtaaatataactgcggaggaaagaaataataataggattgacagaaaggatactaaacaagcaaagcgcagtgaaatttgtgccccaataaagttactgttggcaacatataagtaaaggcaattttttatcaatgactggggagttttctctgagcacttaagttcatgtttcagtgcatcagaatatcaatgctgactctgtagctaaaatttcctaggataatatatttgttcgttgggaatgtatcgtgtgttcacatagtctctacgatcatatgaacacttaaaatctggtgtgtctataagcaatccaacggcgatcgataacttttatttaccccctcgtatcttagctttgatgacaattgtccatttatcacctctcaatctctcaccttaacgttggattgctcataaacgcaccagatttaaaatgcaaatatgagcacgaaggtttcatgagcataaaatatgtccccttgttcgttttacatgattacatcagttcaccatacagcggttctaaaggggaacccaacagagatttgtcactggatgaagagcaagacaaagaaaaatgtcaaagctgtgtatgcaatgtgtgacagtagagtagactggatgcaagtattaatcgaggaccacatgctgtgtggtaacagagtagaatgaatggcagtattatgtcatcaattgtctataataatatttttcgatacgaataaaatcctgccaactaatcaaccggtacacaataaatctacccagcacagaatcgtgctggggtgtttcggtgcccggtaatttcccatgagcactcttatcttataggacgaatcgcatagagcggcagatcgttggagcaccacaccaccaggggcggataccgctgtggattcccagtttcccacccaccacgcgaaagacaaacctaacgaacgaagcttcgacgagccggatggactgtttcgggtcccggagaaaaaggttggtactagggttcagggtcagggggaaggaagattctacggcggaattgaagggggaagagagaggtgcaggtgcagccgaagcgtacctgtatctggacggagacgtgttcatctgagtgggtcggcgaccggcgcggtggcggaggcggggggcgagttccccgttgcggtcaggagagagttggcgtcggcctcaggcggctagggttactagggcactcggacgggagaggacgatgaggacccttttgggaaggaaacgggaaggccgcgactcggactcgcgggcttgatgggccttcagccaatcccgaggtgggctgtgcaggcctcgacggcttcttgaaggccgaggatcaggagaagttactgtgcaaacgacagcagtgaacaggcccaacaaaacctattcctcttgttgtatcagtattactcgcggttagacacgctttgtattcctattcacttggttctaaactataactataagtttttttagcttatgtatacataaatatactgtttttactatatatccaaacacatgtgtatcttagtgc

SEQ ID NO: 421 - DNA, 2664 bp, Zea mays
ggatctttgaggattgcagccagtgccaagagattacatttgtttgtgacggtagttggatggattgtagcacagttgtcatggaagctgtaagtaagcaaactggagtcactttaaactagtacacgaaacacgacacggctgaatttaactagcgcattaatctcatcagagcacgacacagctgcagcgtaaggggctcagggccatgcttggttcagagttgcaacatacaaggtaatagtttccaagtacatgcaccaggttaactgcacttccagtaactcaaaaacagataaactacgtactactctagctaggatcttcattcattaagcatggaacaatggcgttgaagtcagcggcttcgcttgcccttcgtcttgcttgctttccaaagcgccaaagcatgccgaactgcttccaccgtctttgctttccgatccaagtggtagttccacagctcagggaaaggatccctcctgccgccattgccgtccttcagctccgtcagcgcctttgttactgcagcatagggttcctcaccgagctcctttacttcttggagcttcttgtcaccctcattgagtgcttcctacacaggcacgtgcagcacaatgctccattataaacaattcgtaccaatagatacctgttcaacaaaaggcaaagattccatcttaccgacacttttccatcaacaataataaccttgaaaggatgccattcaggattttcaatgtcattctgccactttgaacaaagtctagcactttcaacttctgcatccactgctggaaacttccgcttgcacaggtttagaaacacactgaggtcaagttcaccaactttcttgacgcctatctgtgtagggcagtctgaggatccagacaaactctgcagagcctgcacattgatgaccaaacatcagttctcataaacaaaaaacgctaactgaaactgagtggtacactggcatggcataaaaaatttatcatacatttatcatcaattctcgagcttctcgcagctcatcactgatcttgctttccctactgattatatcttggttgtagttttccgcatcgttcagttcttcgatcttctctttgagctcctcctttagtttagccattttctctctcgatatcgggtcttcatcacctggcttgagctccatcaggtgcagtttcccgctcaagtgctttatttccagttcaagtttctgcctcatctccaactgagtgttcaacctcaaaaaatcgtctagaatagtttttgtttctctctacagtttccacagtaaaaccaaacaagacaaatgtcattcaaaagaaaaccgcatgcaagcacatcaagggaacagggctaaccgtttgtttatccacaagcttttgaacattttcaccagctttctcttgctccaatgcagccaacctaagatgactggtcctcattgcattctgtacagcagaagtcaaaagtatgttatacaagctgtacaatctctgcatatgagtggcataatttccattcagctttcttctgctattattttgactgacaagaacaataaaatgattgtttaatccattctatataataacacaaacaatagggggttatttcgataaggatacaaagtcttgaaatttaaaagaggtttgaacaaaaaaaagttttagacggatagacctcttgcaaaatcaccctaataaaattgttcaaccatctgacacgtgacaactaattgtagaatggcctatgtttccataccataaaatcaaaagtaacaaaaagattttgatttcaaagaaaataacaataaaaaatattttatcattctcaacatctgtaaaagacatacatgacgagaagattctaattcatgtaaggagcagaaaactacagtatatatactaatccccaagctattacgtaattcttgttgataaaacattttgcctcagatgaaagaagttgcccacctttagcttctcctgctcaagattccgtttgtcatgttctgactcctcgatttgtttgtttcttgcatcaagctcatccaccatgtcctggatattggactgtagcttccagttctcctcaacaactctttgtgtgttttgttgaccaagctttctcatcttcaggatttctagtaaaagtggggaaaaaactgttaggatagtcatgaaaaccacaacatgaataaaaatggatagtaaccactgcatgtatttagtcactcctaaatgtatcatgaataaataaccagagtattgctatgtaccttgattgtatgactggagtcgttgctccctcttctgcatcattatgttaagtgaagcagaacgcttgttgtactcagactcaagtttctctaaataaatttccttttctttaactttgcaggccaaattggacagaagtctttcggttttatttgccccttcactcccaatatcttttaatgttttcaggtcaccattttttctcagtagttcacctattgcccctagagaattgtagtcatcagcccttgccatccacccaacagtctctgtacctccacacttcatctccttccagcaatttttactgtaccctttcatcgcaaagtgaccatcaaaggcccgtgcgttcctaaaacctctccagtca

SEQ ID NO: 422 - DNA, 1001 bp, Zea mays
cactagtatttaggtgacactatagaagcggccgcgacaacttgtccacatggcagcctttcccaaccaagagggacctcttctgtgtacactgttgcaaaagttcatgtagcgtaaacatgtcaatcaaattcctgtcaaacctaataaggcttctatcctttagggcaattccattgtttagcttgttacaaaaagaacgagcaccaaaatgaattccggagagtacagcaataagagaacaggcacactgttttatagattgatggttaaaccaaatgcccatccaagcaaggcagctgccccaaactctctcagttttacttttaggcaaacttcacaaagtgggatttgtacttacaaaaaggaagtggaatttgcttgacgctaagagcagaaaaaattctctgcagactgaactgtgaatgtttcagcatgtttgtccaccttcagaaaatcagaaacttttgcattgcatcgctgaaagaaatagcaagttaatacaagtagcaaccttgtgatactcattcacatatcttctgctatcaaatttacatcccgtcataaaaggaatgcaagtttaaaataaatcaaaatgagaaaatacaccggatttcactaaaatctgtacaaatggttgaaaatgaaaaaaaacatttgaaaaaataaatcaggagctaaactaatggagctgcaggtttaacacctttgcgagctgaatttagcatagcacttatattgtgacactgaacactagtactccagtcataatagcctcatttttcatgtccattttcagtcttgcagaatttgtttactgaatagaattgttagataaccataaaatcagaggggctagggcacgaccatttggaatgacagaacaacagtaccgaaggattaaacaattcagtgctttgctaacagtaatattcttattttccagatgagctcaccctgaatcaggatggcgttaaacagcgttccacaaaacacaagtt

SEQ ID NO: 423 - DNA, 763 bp, Zea mays
tagttactccaaaccaaacggggccttacttagagtttacctcaaccaggcttctacaaaaagaaaaaaaaacggacccaactcccataacgaaaataaaccacagggactctggtcatatgatgcagaaattcagaggcaataagattgcaaaaggggaatggcagagacacggagcacacaaaactgtactctacatgcagcagcagggcatattttcagtccagtccagccctacgtagcactgacactactatagcacatcaaatcatcaatttcgataatggggaaaaaagtacagtcagagaagaaccgctggctacctctctcattatgcgtcattccgtcgaacaccctcggcgcaggagcagatgtcgccgcacccgccgagccagcacccgcagcggcgctcgaaggacgccgagatagccaggaagcggttgatcggaaccaggctgcaacacgaacacggcacacggggccaaaatctccgctgcgactgcgagtgaccaggcgctagagcctagcggcgagcgacgagaggaaattgcgaaagcaaatatcgagcccgcgggctggtgtgggaactccggagtccggactggggcatacggcccgaaacagagcgaggattagcagctcaatagcatggagactcttccttaaagcccgagcactcatggcacgtttcggcccattgtctgcacgtgtgttttgtattctgcggattgtcgtctcccaaaaggaggaaaatctcaaaaac

SEQ ID NO: 424 - DNA, 1178 bp, Zea mays
tttagtagtaaactagtaacagatccatatttccccaaaaacaatctccaatttgattaaatatatacagaaactattaatatatatgatcttcagaaaaaataatacattagtcgtcaaatgttttttatgacaaacatagtggaagatattatcttatgcaatcctatgaagatttagaatgttttgactccttgggaaacgagacttccattctttcctggatggagaaaatatttgggtgtgggttatcagatcacctaaaattttagatccagtaatttagtttttttcaaaaaaataggtccttaaattgatagctacagtttgtcttaaaaataaacaatgaaaaaaatacagtatatatatttcaaaactaccgagttctaccaatattcaattgaaaataaacataaatgccaggtgccataaagtacaagtatacattatatatattaacggttaatatatacatttagagtttattggtggtgagaaattgtttcattaacaaaccaaactctaccataatattttctgtaagttattactttgtatacaccttggcataccaaaattggaacccaactgtgagaactccattttttataaaacagtgccgttatacatatgattcttggatagaagataattcaacattttaagtgttgcggtgtagattgaaactattgtcatgtcactgtaatatcaaagaatataatgtatggtacggtctagaatctattttaacaaaatatagttgacatttttaatagaatatataataagaagcaaagtctaaatttaatgtgtggatgaaaaatatgacattcacttagaattagaaattgagattcactaaatatagatttgtaatgtctcaaaaagatgtagcaagggttgatataactccggataaggttttagcaaagtacatattaaaaatcactgaatgtatgacgaaatcatataaagtatataaaaattgttgtgttagatagaacaatcaattttgagtagctatgaggtataaatttatccacatagtgttcagatggtgcaatgcatgtaatagtgtaagcacatgattgctacccacttcactataaattgttgacccatcaatggtggtttttaatttagaaatataaaaatgacgtaaggttctaaaaaatcaa

SEQ ID NO: 425 - DNA, 897 bp, Zea mays
ctaagtagccacctagtcatcgtctcttcttcaacactagcagtcaagtagccaccctgccatccttatcttggccattggtaaatattaatataaatgacaatattattatctaaagtagcaaatgtgtaaactgtaagcgtatagtcgttagtttagccttcaatacaagtaatctagttatcaatttgtacaaaaaacaagaagtgaacttataaaggactaggattatcttatgacaatacaagaagtttacgacagtggatagagatgatctttgtaggttatgaagtatgttgaggtaagatatttttactaacaatttagtcttcctttctcaccagggtcataggcgagacaagaggaataatagtttctacagaagaggctatacagttgaccccaatcctatcatttaagaacttgccacgaacacatggtcaaataccaagagtaggcatgattgttaccacctattagcatccataatccatccatgcgacaatgatatacataagtaaggtatagtctagacactacatctacattatataagttctccatcgtatgttataaatatactacaccctaatcagatatcgattgatataaaagaatcttgcatgtatttcttagaagaagagcaaatacacagaggtataccatggaaatgattcctggcagatctagggctttctttaaaagacttttctcactctctccctatttgcatagtattactatgactgcctctgggtacgggtaccccgtgcgctatagcataaccggccaacacaaagtatagactaaggaccccaccatcttggtgggtcaaatcaagaagacccatgtatgaggagaagactgtatgaccaggagccctgccacatggccgcg

SEQ ID NO: 426 - DNA, 1469 bp, Zea mays
ttactatgcaattaaaacatatattatatctagatacataacaaaaactacttaggaaaagccaaaacattttctcaatggcttgacagatgagtaccccatctttcttttttaacccctgaaacacttctctttaattcttggcctacgaaaaaaagctaaccatgcgccacagacaaaaaaaaaactaatgttaatcctattattaaagatctaggttgacatgaagaatcacgttccttcgcactgaaaaaagtttggtggcgagcattattagagcttaacacggacccccgaattaagttccttcaggtacaagatatatatgcccatgggttagtgacatggattttgttttttaacactatctgaacacaagctttggagattctccccggcctgcagctttataagctgtagctgacccacatattccccgagctgcacccacaaagatcgatcggttcggacgtcgatctcacgaccaacttcagcactctctttttacagggtgtgtacatgtcgtattccgatacagatggacgacaataccttgaactgagtacgatgtgcttagacaaaggagtacaatttcaatattaaggatacgataagagaggctaggaatgaacaaagcacgcaccttctatcttctctacctaaataggagatccccactacatgattttcatgacttttcataaagccacgtcatcatcaggcatatgaaaaaaaaaatcatgtctgccatttcttctttttgtggttttgcagtttctccgtccccacattcgcattcttctataacccttgccatttttaacgtgatactacatgatgaatttcatcaattaccttcagttgttaatatatgtaactacatgtgctctcataatgcatgttttccataagctatttcaaaaatgacagcccgcagcgaagcacggaatatcatttagttagtggagatgttttgcatcaatccaaaacagccactgtgttttgtagtacgaataatgatgcatactccaggcataattgctccaccgtgtcatgccacacacttttgatgtcaaacatatacgtaggccttgcatgtcgcatggaggccggtaaagcattggtagtttggtactcatggcctcatgggccatggcaatgatcccggtctggacatgtttaactaaaagcacacccctttcagccaaatggacagagtaagagtagcatgtttttttttttggtgtggtaagagagagatggtatttgattttttttaacataggtatgttgtgacctgtgatggctgatgatgactatgagctatgcacaaaaattgatggaacaactgctactactgaggttctaataatgttctacattctggactgaaatttggcggaccaacggatctatagtgatgatttgtttgcgacagcaagttgaagcctggtgatgaattcatcgac

SEQ ID NO: 427 - DNA, 2322 bp, Zea mays
cttgaacttctttaggaccaacaactgccatgagtggcaccttttgtgtttcagcattccttattagctttggtaggcgctctccatgacagacttcaacacgtagccctcttgatttcagttcggaggccacctcgttacagtattgcaactgaaaatacaaagccaagatgtcatggactcatggttacataactaatactaaggcaaacacctatctgaactataaatgcctcttcaatcgaaagagaaacagataatccagaatatcagtgaacatatgctttcaattctaacaacacatggtgaaaggtaatgcaaagcaaattatcaaacctcattgtctgtcacaggtagaatacgtgtctgggttggggcaagccaaagtggaaaatcaccagcatagtgttcaatcaggacaccaaagaagcgctccaaagacccaaggatagctctatgaatcatgatgggtcgctttttctcagagtttgaatcgacataggtaatgtcaaaccgttcaggcaaattgaaatccacctataacatatatggaaatggagtgttagtgtatcccattttctctttaaacaatttgagtagaacaaatcgcattacagggcatcaaacttgtgttgtacatgcaaataagtgaatcacctgaggtgtgccaatgtcaccatgcaaataaatgcaacctgtctaatcacgctaacatggactccaagttttgttcaacatggcaatgggttcacagtagagtggtgtgccaatggtttatgacctttgcattgaacccctgcatgctaatcatattagaacaaatatgttcacaaactatttcatgtgtttagacattgactccagcgttgggtagtgacatgacggccacaagacggttagtattagtgggcatgatgtgaaatggcggcaacattttcactagggcacagccacaggaaaaagaatctctgtatacgggatgcagagaagtttatatgcagcacaactcagatgtcatcaatgtgtgcatcggttgggttgcgcctgcgtgatggaggcgtggttacagaaatcactgggttgcatgcatgataggaaaatattcagacggcaactaaacaatgctgcacgatgctgctctgcatcacaaatgcagagattttttttccacgcatgtatttatctggcagcagcacactagccataaagtggttagcagagcaatttgcattgggtaggtgaaaactagtatactaccgtgtagaaagttagggcaatttataaggaacatatggattaaaggatattggaagatttttttaattattataccacatccttcactatgatttccatgtcagtgttcttagattgacagttcgtcgtggtacattattggtaatctcagaccatccggttagaaagtttagtcatggattagattaattttgaagaacggcgacatatttacatgtacaagacaattttgatgactttcaatgccattttcacatttgagtacctcttatcccataaaaaatatatgatttacctgcacagtggaacattgccatttccttccaagagcatcctcaatttttagatcgatttttggaccataaaaagcacctccaccttcatcaaccttgtattcccaacccttatcatctaatgcattcttcaaagcaattgttgctttttcccatatgtcatcagtgccaacagatttttctggtctggttgaaaggtttatctcataataccgaaaaccaaattgtccaagtatttgctcagttagatcaagaacacctctgatttcatcttttatctggtcctccagacaaaatatgtgggcatcatcctacataaacagaaatagttgaaatctgcgcatcatcctacgtaaatagagatagttgagaattgaaaacaacaccgagagtaattttgaactttataaagtagtggtgagaaaattctagtaccagccatccagtgctatgattgttagcaaaatgttacagagtagactatccatattccataacttaagtcttaagaatagtatgcttagaaaagaactgaaacaacaggtgctgagagctctgctgtctgctgtgtaaacgaatcagaaaaaggtcatatgtggactcctgctggctatatgatattacataaccatgcataaaggcataaagcaattaataatataatgccaaaaggtacttcagggaaaggagcaaaggctgcatagcagtactaaaaagaatgtcattcaaaaataaaaacatcctcagtattgttcatctcatctagcagtag

SEQ ID NO: 428 - DNA, 4296 bp, Zea mays
gtatatggtgattggttcttccttaatgctctccaaaatctccagcttgtaaggctcattgagtgcttcaatcctcttctgagcctcttctcgggacacctcctccctcaccaatgggaggttctgtcggatgatccgatcctatcaaacaattgaaattaccaaattgacaaatcaaaaccgccactatttttttccctgaatattaaaacagccactttgcagttcaggtcaattcgcacatgctcagtgcaggaatgcagactcaccatctccttcttaattttcttgaggtccttatccgtcaagggctccatgtcgaagtcgtagtagaaaccattctctatccagggacctattgtcaccttggagttggggaagagcttctggacagccatggccatcacatgggcgcactacagcaacaattgtgaaagacagtatactaaggtgtctatagttttgacgagacactaaactgtacaggtattagagtgacgggactttggtgagaaccgagaccaaattaagcatacgattaggccagttcaagcactgtaacatagggggagaaggggagcggcagtacggtgtgccggatgcgcagaaggcgttcggaggactcgttggtggggagcaccacccgctcctcctccgcgtccccggtcggagccgcggccgcgggagcatcttctactggtgccgagggtgaggcggtggaggaggaccgcaccgcagtgtatgggagcctgcgggctgaggcgggtctgaggggcgggaacccagacagagaagcggccgcgggacggtggcgcggtgacgaggggaagagcgagccgtggtgggggtgggagcggagcaacggggcggaagcggatggggccgccattgtggcccgggcgacgccgagctcggggagcgtgtggcgggcgttccgccgttccctcgtctttggcacgccgcacgttaccccgtctggacttcggatatcgttcggctgaaccacggaacggctcgttacttggccgaaagatgacccgctgccggagaacgctgaaacaaacacggattaactgttgcgtgcaaacagaatttaggggcaaacgtgtgcaagtaagtctgcagaacgtttagatagatcatggtttaactgtagatgcggagctcagcagggccacgccaccgtgtgttctttctatctgggattgggatgctcgtccaggtgtgtgccgcgcgtgctccacaaacagcaggaaacgctacaggaattagcggtggcacaccgttctcccttctccgagaaaggcgagcgccgcaccgtcacgtcaccgccgtgtcttcccaccaagctcgcgcgcgcgcgcgccacgccacggaccacgggccacggcaccggagccgcgtgcgtgccggcccatatctgatgtctctatctatccactgaccagtccccatccgcctccgaacccacgaggccacgacccactactacatcagtccaccgccaccgcgcaccgcgagtccgcgacagacatccgcgccccggcctcactctcactccccagtccccaccgtgccgccacaagcgacgcgacgcagccacgcagggagagggaaatggccacggccgcgactgccacggcggggagtagagcagccgtgctgctgctgctctcgctggcgctggcgctggcgctgcggccctccgacgccggcgcgggcggcgactgccacttcccggccgtgttcaacttcggcgactccaactcggacacgggcggcctgtcatcgctcttcggcgccgcaccgccgcccaacggcaggaccttcttcggcatgcccgccggccgctactgcgatggtcgcctcgtcatcgacttcatcggtacgtgcgcgctcgtacagtcgtactcgtacgtctcgcctgcggcctgcccccgaaccactcggccgctgaacccgccgccatggacacggtctgcgcgggggttttcactgttcaccttttcacctgccctcccatggccatggctatgattgcactgcgcgtcgggcccatcgattgacacacccaaaaccgccttcacttgccgggaccaatgaatgcacagcgttaactcgttctgcctttggtcccgcggcgaagataagtttggggcaaaaaaaaaaaaagatagagcagtaacctgtaacaaggactccagtacgtacggcttttagagttttcgttagtaccaatcaccatctgtttctcacttcgtctcggctggaacgcgacgagcagagagccgaaccgagcaagcagaagcagacggttgctcaggatctctgaaacgacaaagccaaccccgagtccctgacacgagaccatgacccctgaaacaccggcctcagaccatgtgccgcgtgccggacgagcatgggctccgttcgacctcgaccggcccatgcgcgtgcgggcatgtccccagggcaaccatgatgcgcgtccccgtctcaatccagcacgtgagcacgcgtgtcgtgtgattattttgacctgcctttctggcacgatcttggtttcattccaagcaatctgacaaaaagttcagtgattcgggcaaagtatctttgcatacgatcataggccactgccatgctgttgggagatacagtacgagcaatggagatgccctgttgatcttcctttagccctttttattttagacgaactcctctttaaccttttggggatgctgatattgggaaggacaggaagaagcattagcctattgtggtagtaggtacatgaaaatatagtgggggcaaagcggcatgaggagggaatcagatttgggtggcagtggaggaatattttttatcaaatacggatgtttcactttatagattgtcaccagagttgaaggataaagggtgacactgacatttttttcttaatctgtcctttggtaactttaagggtatatataacactagaatctgaacagcagacagtgggaagtgctacaaaacacatgcaggtcctgttcgaaatgcatgaattcagtaagaaactgaatgcacaaggcttcaacttgtatggaactacctcgttctatatttctactgaattttcggaaggcttcactgtgtttggccaaattcatgcacctcgcagtttagatttcgcaatgaatgtcaactggtaacagaagcttctgtccctagaggcctagacttcgccaactggaatgtactgatcattaagtgtcgagttgttttgccatagactagcgccaagacagtaactcttcagcgacaaatgatcaaatggtgcttcttgatttactctttatctcttcgtttcccgaactgcagctgaaagcctggggctgactcacctcagtgcgtacctgaactcgatcggaagcaacttcacacagggagccaactttgcaacagctggttcatcgatcagaagacagaatacatcgctgttcctctctggtttcagccccatttccttggacgtgcagttctgggagtttgaacaattcatcaacagaagccaactcgtctacaacaacaaaggtgacaacagaaaccccccaaaccatctccatcagtatttttatgttttatcccgtcaagattttattcagtaacacttactcttctacatgtaggcggtatctacagggagatcctaccaagggcggagtacttctcccaggcactttacaccttcgacatcggtcaaaacgacatcacctcaagctactttgttaacaataccaccgaagaagtcgaagccataatccctgatctgatggagaggctcacatctataatccaggtgctctttggcagagcaagcatcaagttgctgttgctctttggaagatgttaccacacacaacgttccatggatggtctgctcatttagctgaatacatgcaaatttgcagagcgtgtactcgcgtggaggaaggtacttctggatacacaacacagggccgctcggctgcctgccctacgcgctgctgcaccgccctgacctcgccatcccagcggacggcaccggctgctccgtcacctacaacaaggtcgcgcagctattcaacctcaggctcaaggagactgtggcgagcctccggaagacgcaccctgacgccgcgttcacctacgtcgacgtctacaccgccaagtacaagctcatcagccaggccaataagctcggtaaggcgttcatgttggtgttgtttctaaattctaatgctggctggctctgaacgtttgtgacttgaagtcgcg

SEQ ID NO: 429 - DNA, 1922 bp, Zea mays
tgttacatccttgcatgaaggctgattgtgttgggctgtagactttgtctgtcactaaaatcattctgtgtgtgaagttcaacctttgttaaggaggcatattggtctgtattgctgaacgacattagcgtccatgacttaagggataggagttattaccccaaagtcaagctgaatatatagcgatattttgtattttgcggatcaaattgaattcattttgtatttttctaattttgtctgaatatatagcgatattatttagtcatcacctaggtcatctttgcggatcaaattgttatactttgtgtcattatgaactcctaggcccagtttcgaatcacgagtctcttgctgcttcggccactttgtcttttttgcctaatgctggaatccttcccagctccattataacacatgctccatgtcttgcattatctttatgggactgtgtcatgtcacttgttgcttgttcttccatcattctacacttcacagctttattcatattgtgatgctacttgggctattgattcctctaatgattattgtgtttttaatgattattttattgcttggtagactaagtagacaacactttcttgttcaagtgcatagggtgatttgcatgctatgactattgtgatggctaaggtgatttgtgttgattgcttgtagatttatgtgtttctatataggtgctataagtatcgtacgtcctccatgagcgtagtaacaaagtgaggttggtgaatgactaatgtttgccatgtggccaaatcatacttaagaatttaacctctctaaatcaaccaagaagaagagtctgttccccacatttatgccttggccatcttccaataaagaagaatttcaaataatcgaccttacaacatgataaagatgattaacaggtgagacaagtccattttgggattgttgtgtttttctttgctagtggacgtacccgaccaagaacatttctcctcatacccaccaatagttttaatttcctcaaagggtcatctttagtatcagagaactggcaattagaatagcgtttgtggtgaattttatctattcttcctaatcgttcatcttccctatcaatgtcaactaaatcatacacaatcactaggtagcactcaataccacaagagaagagagcaactcacgctcatgacaaactctacccatgaattatttttctaagctctagtaaacgaaagcacatcaccacatgattttttttagaggaacatgtccacaatattaagaaactaatattacatgttatggaaaagtcttgaataatggaagaaaccgctttctatagtaaaggtgaaataaaagattaaagatgataagaggcatggtgaagtctaaagctacccatgattctataaagccaaatacaccagcataaaggatctaggtgacaacgagagtaaatatgattgtattgtgtggaataggtcaatacaaaccacatgtgtcataccttgttcgatacacattgaacaactaaaaataacatatattacattagcatgtatggacaaatttggggttagtaagaaaaaatacaatttctagcttctcagctgattatggtatacaacacgaccaacataaaattacactaggaaaaaaaggtaagattagaggagccatcacagagcatgtgaaccctactagtatgaacaatataaattttggtacttctttctagtagggaagcgagggaaaagattttgtgtcttctcttgttctcgaaacatatttctttataaagttacaaatcagctaaaaagatacaaaagtttagatgacaagttagcccatcataaggtcagaacattgttgatgatacgtaactttataaggaaaaatgttttgaggagagaagatagagaatcatg

SEQ ID NO: 430 - DNA, 792 bp, Zea mays
gaatcatggttagctacagacttcaccatgtctcttttcattttactcttttaattcacctttactgcagaaagcgacttcttccattattcaagacttctccagcacagataatattaattcattaatataatatcgagatggtcctctccaaaaaaaaatcatgtggatatgtgtctaggtttactaaaacatagaaaataattgatggatatagtttgtggtgagagtgagttgctctcttgtcctataatattgactgctaccttgggattgtgcaatatttaattgacatgaacaacgaagatgaacgatgaaattcaccaccgtattctgcttgttgccagctctccgatagtgaagaagtatccatatatagatgaaattaaaattattggtggggatgaggagcaaggttgtatgatactagatgagactgtcaagacttccaactcctagagcctcgtatgtattcagtataaccacatgctgattcgaccacatatgtattcaatacgtaccatgaagcgtgatttgaaataggcaatgtagagggagaggggcgctgtcaaagttgaagatggcattctaatttaagcgaccggccggcgtgaattttggcacaatgtaatcaagattgcgggcagttagcagcacgatccaccataattaatttgctttgtcacaaaaactttgcatcttcgacatcgaagaccgtggtataccagaatggaaggggcggggctgagttcatacgtaccatgcatggcctcagatccgccctgggctgag

SEQ ID NO: 431 - DNA, 586 bp, Zea mays; identical to SEQ ID NO: 335

SEQ ID NO: 432 - DNA, 1051 bp, Zea mays
tttgggactaaaagactccaacatggcaaccaaaaacctattctagattctagaagatgaaactgaaaacgatgcagaagcgcgagaccactgattagctcaaccttttaaaaccttttcaactaataagtaaataagaaagtcactgtagcaaacagaagaaactggttcagtccaatttcaggcactaataaaagttccagaacgacaaatggtcaccagcaacttcttaacatccttccagatagaacatcagttcagctcatcacatcggcagctcgccgctatctgctatgacaaccttgctctttggttgcccgctctgccggccctcagcttccaccttgtacacaacatccattccagacaacaccttgccaaacacaacatgcttcccgtccaacctaacgcacaaaataaagcaggaggcaatcagtagcatagcaccttcagtcaagatcggagaaaatagtcactgttaccaagaccagtgaatattaacttaccagcttgttgtcacggtggtgatgaaaaactgagatccgtttgtatctctcccagcattggccatggacagaaggcctgactcaacaatcatattagtaaaaggatcctaacaaaccgctcgaataaaccattgttatgtaacagataggatcccattttagggccacataaaaaaatctaaggcgtaactggtcacctggtccagtgtgcttgatcttgaagttctcatcagcaaacttcatgccatagatagattcaccacccctcccatccccaagagtgaagtcacctccttggagcatgaagctgggaatgattctgtggaatgtacttcccttgtagtggagagctttgccactcttgccaattcctttctctcctgtataaacaagaaagttgagagccacatgaaaccaaaaccaaacaagtgacttgtagctatctagtaagacatcacttagatatttcacagatgtaaaactattcaatatttggaatgggacctcttccattacatggcaggctaactataagatgttttgct

SEQ ID NO: 433 - DNA, 610 bp, Zea mays
ccagcggcgctgattcatgtcgtaccgtctagataggagttggcgataacagagggcaacaggaggagggatgagccatggtaagcttgaaggttagagtcgaacgaggcaactggagaggtaaagaggacatctaggtatgagaacatttgcgagtgtccatgtttgtgaattaatgagtgagagacccgctacaaccccgatggaacgacctaaattacatgtttgcagggtcgaacgactagcggtattggttacatggctctttctgcaagattcatattagaagattgggcttctatttggtaaaagaagaacaaaaataactaatatttctaactaactaggatcaatagcacaagacatgattttgtttggtgttaccagatctaggctttaacatatccaactccttagcaaatacaaactagcagagaatttgattgagtacggaagcatatcaacggctgacgaattgcataaaccggataaaaaagttgacatataaatataaactagtcagatgctcgttcattgctacgatttctatatgtcatgtgactttgttttaataaaatacaaaaaatattggttatgtgggtatgaatgt

SEQ ID NO: 434 - DNA, 2215 bp, Zea mays
ccaccacttgtggataattttaccttatttttccataaccgtggaaactgatgagcatggatgttgaagttgatgtttggaccatgggttggattagaaaacttatagggatttttttacaaaagggatgacggtggaaaccagaaaaattggtgccctataatagtagagaagagaaagtgaaacattaaagagagttttgaattggagattatcttgattgtttgcggtgattttgttcccgttgtggcagaaagtggtggttctcatagttgtggtaaagttttcttgtcagggccttgtagcctaggacacatcaatttacatacaaaagggcttaagctgaaaaaatcttcgacaactcagaaatgtgccccatcgattgttcaatggctcaacgtggttggaagagtccatctaaatactcagtgttccttaaaaatataactacagtaggtaaaatgtaaacacctaaaatatttctaaaagaactatgtgcatttcgaagattggtcgttatgcgacattgactattaaatttcaagcaaacatgaaaatatcatggagaaagaagttgttattttgaatggcagtaccaagaattatcggcaaactagcagcaacaacaacaacaataaggtatatgatatttttccttcatctatgtgaattccgtctttaaattttataagcaagttagttgacaatattgtgtggctttataggccacaattttccccattttctcttagaatacgactatggaagtgcataaatgtcctttagcgggataactagaactgtcatgcaaatattcctctttgacctagttattagtcataatccagttggaatctatcggaggtatcaactttgataatatagatgaatgtatcatgcattcaaaatcagaaggataacgtaaacgacataaatatatactgattcaaatattaggtatgttcaattaagagtatagctcttatctcgtatagtgaagtttactagagcgctagtggctagttgcatatataatgtagtctaaaaatatgtatcgtggattcaaatatgttttatagttgattacaagaaaacttaaatagaagaacgaccatatcttttagaagtcatcgtccaatctctatgtggtaagttacttgtccatcatgtctatcgatgtaccctcgtttgattaggcctcatcttcgctaacctaatgttaatgggcccttgttcaagtggtgagttgtcctaggtccatatgattgacattatatcccaaggactttgatgtcaggctagttgactgattcaatcctttgagtcctccaagcgcctgcgcgttgatgcaaccttcatcttccacttattgcacatcattaagtcatgctatagataatgatgaatgatcaaagaaatcttccaaacacatgtgtgttgatgcatcctctcttgtacaagcataatcgacttcgatttagggataaaccattgtcgggtatgatcttatcttatactcataaggactttgttatttatacatctcataatcatcgatatgtctttgttcctgtacacgtatccaatgtaacaagctatatcaatagctagaaggaatcacctctaaaagctatggaacaaaggaggtcatcgagttttgtgttgactttattcctagatttaaatcgattgatgttcctcaattgtggcatgaggtgaggctaagtgcatagggcacagtaggaaggaaagcaataattagaatgaataaagattatttccataaagcacgctgctcggttatgcaaaacatctcctggatggctttgtatatttaggaacacaagaatattctatactttgacttcccaagggagcctatagcccaaattatgcgtcgacatatgaaaactttttatggttggttgcgaaaaattttcgcgacaatgacattgttgataaacaaatatacttgttgtcttggagaccatattgcaatatctggacattgcatgagtatgagataaatgagactgttttgtacaatagcacaacttaaaagagcacaaaccaaaacagtggagttcacatatatgcatgtacctaaatgggaataagaaaatatattatggttacgtagaagaggtatgggaaattgactaaggaccttgtttagggtctctttgttttggtgtcaatgggtgaagctgtccgg

SEQ ID NO: 435 - DNA, 2159 bp, Zea mays
atgttaaggatatgtctaccaaactgaagaatgggaaaaaacaagttacacgacaaaccaaagcattgtatagttcattcaaggaaaagaaacattgtaggcaatcaagggcaagtcataatcgaacacgtgagaagattatgatgaaaatgacaaaaatcaacccttcacaattaacactaacccaaccattctactataacaagaatggtccatggttatggagcaatcataaccaagtgacatatgttaataaaagtttattattgttccttctcaataatgatgtttaataatgcattagatttattatacaataattataaagtagttttatggaaccctaaatacaactcctaagtttccatagctgtggtgaattttgttgtatgtgccttaaaaattcatgcttttatgtgccacaaattaaggaaacactacgttttagatttttgctattttctatagctttgatgattttttgtttagcgatacaaagtgcttaaatgttgaattgacgctaccctagaaacaatccaaaatgttaccaaacttttgtattgggtctcatatggctcaatgaactaattttgttgtacgtgtaagagaaactattttattttgaaaatgtaatttaacctcgtttctccattttatcacaaagtaaatgcaataataaccaaaattaactaaagatcgaaatttttgtgtggatccatgctttaagtctaaatgcatgcaaaaaagtaaaaatttaaacactagcgtatctcttctaatatataaagcgtcagttccacgctcatctgttcccttgacctctccatgctctccacatttaaatgggaaaaggctaaaattatatagaaatgatgattcgaaccatggttgttgcctctaaacccatattcacactcatgcggctaatataacacacatatcattttgttttatactttatattcaagcataaatggaaagtgaagtgtttgtgccatttcatgaatactcactacaactcctaagtttccatagcgctcgtgcaatttgataatattagtgttaaataggacaaatttcagaaactttccatttcagtgtgtgaaataagggaagcgtaggttttttcatggtcaaacctggaattttatcaatttgttgtattagcaaaatattggactagttgttatacagctcgctagccaattataattaatctagacaatttttagcgttgttagaagttaaactgtcatatcgatttcagttacaagacctgatcaagatgctctacaaaaccattatcgcagcagcacacttctgcaactaattcctatatagtgtgttttccatcatccattatttgctcgcgtcacgggctgcagcgcgctggtctgaagaagcgccaaaaggcaggcctggtctcgatcgaaatagtggccgttccggcggctcgcgcgtcgtgtcgtccacacgtacggcgaggacgacatgacatgacagttccgatgctgctgcaatgcaatgcaactgtgccttgcaacatggcagccgaaaaacagcaatcattgacccaagagagggaaaccacgatccaaatcgtcgcggcacgcgtcgaatcaatccgttcgatgcatgtaaccggcggaggagcaactagtagtactccctgggacggtgactggggactgccgggcggtggcgagtggacaggtgagaggatcggagcagcccgcgcgctacagagcggggaaaggaaaaggagagcagggcctagggtagagggttaggtcgcagcagtgctgctacggcaggccgctagtagctccagacgacgtatggaaatggtcgcaccgttatgcccctgtacggctgtacagctgtactctgtacgtagacgatggcgcatggcaccagatcaacgtgcttgccagttaagcaccccggccgggctagggctagccgtcgtcctgctcagcttcctcgcggagcagatcaaggacacgctcgtgactcgtccatatgtcgtcctcgatctgctcgccaccgtgagcggtcgcagtacgtcgtcgggcacggtagaggcatttcgcgcgcttctccaagcgtgccggatcgtccaatcgtctgccacataccatattatcgtggtgcatgct

SEQ ID NO: 436 - DNA, 1308 bp, Zea mays
atgtgaagtatagctttaagtagtgatatacaatggagttcaaaatgctatgcctgtaattagacaagcaatagctactctgcaatttcctactcctaaaaaaccagtcatctttgacatgatcaaacaaaaggagagaaagatgaatggttatgcacttcttgatcaactaccagcagaattagtgtttcatgaactgaaaccatacatagtgctgaactaggaggaatctagacaactggttgataactgatgcttcaaattttaagaaggaatatagacagctggttgatttcttcaatgtaataagccgatgtttaaatttttaattcaaagatgcaaggcccgacctagcccttcgtccagggaagcaaagaactcggatattatgtttcacaacatgcttgaaatcatagctggaaagaggatagatgagggaagaggggaaggaagagagtgtaccagctaacccattccgtttcaaattatgtagaactgcaaaactgcagtactgtttcggttaagctaatcctaagcaaaactgctttggttcaagttatgcaaagttaattttcaaatcaataaaaccgtggtactgtttttgaattaaaagagaaatgcacaacacgaataaacagctaatgtacttctctcttgaatacatgctagaagtaattatagtctaattatgaacagataacctggatctagataaacagataacaaaattaaggcaataaacatatttctcctctagcaataaacatgctctcgaattaaaagagatatacacgacacgaataaacatataacctgcagctagataaatagctgcaaattctcctcctctattgaagtatgcagagttttattggttcaatctaataatactgcaggactatttcatttgcgtcccttgcatccagataacctgctagaagggaactttactcttttcgaattaaaagagatattttgagcaaaatctgtagcctagttctttgcagtagtctagttctttgcagataaccttgagtagcctagttctttgcagtggcggaaacttgatgaaataaaatccgtatgatgctagctaggactttggagaagaatacaaaagctacggccaacctctcgtataccaacccattattgtttactgaatcagtggcatgtatgcttggaaaatacaaaaagttcaatacgaatggaggaaacacaatctggatgagctatagccgattgacgtcgaaggcaaatgctactgcttttctatttggaatcgagattcgagattgctatagctgg

SEQ ID NO: 437 - DNA, 2202 bp, Zea mays
ggatatttgagtagtcattcttgatctcaaactttcataatcgatgttgggttgctcagggggaaaatgatgatttttttttgatatttaggaaaaaaataccatgatctttgtgcacaccaggaaagagaagtaggaaaacactaattgattgcaagtttacagttttcatgccaaatacaggcccctattaaaatttatgctctttcatataatcagtgctctaaaataattaagttcatctccttaattgtgtataaggaaatacttaaaatacagcccttactccaagtcagtaggtcaaccgtaaagataccaacagaagatagaagttctctaaaaagaatgtttagaggacacgttttttcattgcaagtgcagaatgttattttctttcatttttaatcttaacaattacaagatatgtcccagttgttgactgcttgactgatcacctcttatactaatatgtagagaatgggaaacattgatgacgtcgtgcctttcttcgggagaaccttcaacaaaatctacccactcattatggttgtttataccctattggtcgctgtaaattttttcgagcatctgatagacttttttgggagcttgaaaaggttcaagtgctggactgaccaagaaggagatatggatgggttggatccgtctggagtattcattcttcagaaaggtaagaatttcgttacgagcagtaccttgtgtctgaatctccgtcgcagcatttcctatcaacttatcatgcttacacagaccattccaaaccctgcttggttttgagagaaaaaaataatcaaaccctgctagtggtttcggtaacgtgaagcttgttgctggtggttttattagaaaccctgcttagcttggttatagaagtcattttgctccagcgccggcttgctctatctgtgtatcgtctgtctgatgttatttgctttcttctgcagagagaagctccatggaacaaggacgcaaagtcagtgagcatgcagctccactagcaagaaacttcagctgtttaggcgaagacgtcgaatctggaaacataccacaggtgcgaattagtctggctgcgtcatagtccttcttctagtccatttggaggttccactctcagctaatctttaacttgttttttgcacagggtgacggtacagtggagacggagccggaacgaaccgccgcccagccgaaacacggtggcgatgtcgctcagagtcagagatattctccggcgagggaacagtgcagcagtccgaaaccagtggaggttcagaaggggatctcatcgacctccaaatccaatgagccgccttgtgtgagtgcggcggcagattcaccagctgagacggcctcaaggtgggcctcaatgaagacgggtttccagaacctcagagcgaccatgggcggctccaggaagttcctcctattgggcctgtctcctagggccgggacgaacgaatccgctacggaatcactcgacgagatcttccggaaacttaagcggcattcgagcaacgcggatgcgaatcgactagacgacgacgacggattacctttttgaccaacggtaggggcaggggcagcaacacagacgagcgcaacactgttgagaccggcaaggtctcgtcctttcgcttggcgtatctctcacgactcaagtctcaaggtagcaaacaagaaagctaaaggctgggaaggagtagagggtacactggatggcagggactagaccaaggtacagaacataaagttttctgtatgttcgagggtaggctagacgtgccacaaataggacaaaaccctaaaaatgtacagtacgtgcaagccctagtatcatcggtgggctgccagatgtgtttgtggtcatctgtcacgctattatctgattgcttacttctgaacagataactcccaaaaaaaaaaccatccgcaacggagaatgcataataataataacccctctaaagaaaagattgatgcataatgaaggactgccaaagcagtgtcttagttgtacgccactcctttatccgagaatattggttacacctgccatggaagaccaagtgcctagaaaagcaaaagttgtgcagctgctgatgcagcaatcatgttgtcacttgcgattggaagatgttcgtcgctacttgccaaaacaggcaaacgactcgctgccagtag

SEQ ID NO: 438 - DNA, 526 bp, Zea mays
gcataatccttctctttgtttggttgacgacaatatagaacctcgactggtagaggatatgttgatactgacaaggtattcttcatccactagagctagtgacgatgaggaccttccatgctctcctttagctccatcctcacaatcgactacgacagttagacatgggcgtaagtcttataatagctcgtgtaacacctcaaaataatattttgagtaatctagagaatgtattttcaggatttaaagtttcatatgtgttataataaagaaattgaagaaactaaatgaaagcgaaaagatcttcatatgaactaaattacttctttgaataatatatctgagggacgttcttaaggaagtatggataaaattaccttttaatgaatgttacacattagaaattactcctttcttatttatggtttgtgtgttgaaagcataaattatactcttgcattcatgtgaagttttgtctgttcacttaaattagttgaacactatttgaatttatttcgaaattcgg

SEQ ID NO: 439 - DNA, 609 bp, Zea mays
agttccaaagccaggcatgagctcatctctagagaacacacctgctgtgaattgccactcaggcctcatatccccaaccattacccctactcacacctattgtatctagataaagctgtacttgtttgactacgtcaggaattctgagttacactccgcaacatttatcatgatcagacttttttcatatttcctacttgagcttgttgccttttggaatgcttctgtatgttgatatgcgcccgagtttgagcatctgctggatgcggtcggcatgcatgctgttcgttttgttctgcgtattgctctttgttcaactcctatttcctacataactagcacactcctatttcctacatattttccccttatttatacatgttgcctccaggtatatgtttttcggttcctccagttatgtacatgttgcctcctctggtagatgtttcctcggagttccctacatgtttcctcaattcctcctgtataatgtttgccctttttttgtatatgttgcctcctggtgcatgtttcatccatgcttcctccgctttattcatgttgcctccattataatacctcagttattataatatgcccactccgtta

SEQ ID NO: 440 - DNA, 654 bp, Zea mays
gtctaataccttagttattcctgtggacgcactcagttattctctggtttcttcccttcgcgtcctctcccgccgccgccgccgttgaccagatgggtcgcgtcatacgcgcccagcgtaaggaagccggctccgttttcaagtctcaggaggactggtcgtctcagcgaacaggctgcctcagccgcagcaaagtccgacaaggccacttagacaacttttgcggttgtttcaattacattagttgatagtcttctttgtgataaaacagttaaagctaaatatcaaaatcatatcaaagaagctgtagatttctgaaattttgattaattttctttttagcaacatctgcaggcactctgtttccaaatatgccgagcatgacaaggagctgcaaacccggtgcagcccacaactgaaaatccaacaagttcttggcctgctctgagaaggttctcccaagtccatcttcaaaagcttcagcagatgaacaatatgtcaaaatgtacgaagtgctgaaaatagtatctgaaaagtttcctctgagacagaaaaataaaggtggtgctagtcaacagaccaatgaaggtggtgctggtcaacagaccaatgaagtacctgctggacaacagaccaatgaaggtggtgctggtc

SEQ ID NO: 441 - DNA, 533 bp, Zea mays
gtaaagttggctcaacattcggataacgaggagatctccatgcacatggacacagatatgctcgtcagacattttttcagtgtggtcttaaataacctgctactgccacaaaagtctatttttatgtaacctcacctgaacttcaagctgtatatgacctagaaaagttgaaaaaggttgactggtcatatgtgatatttcattcattaaagaaagctcttgcactgactttaagaagaatccggggcatatgaatggatgtgtccttatgtttctagtaagtaccaggataatgcagagcatatccataattccttaaagtaattgtttttctcatgttgggtaggaaagtgactaagtgaagaatcgttggttcacaggttgttttcatggactgtattcaaaggaacagcttggacacaatgttgcagaattaacctgtatacggaggcaatggtcgataaccttttgagtgcaaaaccaattaagaaaatcagtaagaggacaaaaagggtacgtggacaagttgtcgc

SEQ ID NO: 442 - DNA, 2195 bp, Zea mays; identical to SEQ ID NO: 397

SEQ ID NO: 443 - DNA, 3289 bp, Zea mays
agtattttctttttccacacacataatttcttcttgaaacaagttatgggcagtaaagcacaagtgccacatgtacatttctaaattctgccagtacttaggtaggtagtaacagaaaccacatgtacatttctaaattctgccaaataacacgcaacatgaggcaaaagggtcatgacgcttgagttacacagccctagatcctgggaatcaaatgtcatccacataaacctcaactgaatcgtgcattcgtatcggcagctagatctgcttgtaacaagtctacgctaggagtaagctgggggtagctttgagcagtaccaaaaacaagctacagcaaaagtcatacttcaggcacgccatgttctagagctctcctgtaggtaagctgggtcatggatggatgttaggcaaggttgccttcccactccactcagtccaaggaactgctgcggcgctgcccggttaaccaagtgtcaagctactgcatctgccgagcagttcctcctcaacaatctgaaatgaatgaagtactggatcagatgcaggctagtaaagaacaaacaaacaaaccattaaagattaaactgtggtactgtactgtaacaggtagccgcagttgaatttaccttgtaagtttcaagcatcagctgaccaccgatttgtttctctgtcacatagctgacatatgtttccatcaaaggagcattaacagcctgcaaagagtaaaatcagcagattgtctaatgcttgttgcatgcatgcaatgtacagaatcccaataaagcataggcagcagcagattccacttcccaatttaacacttcactcctggtagccaagtgtagagagcgcataaattgggaaataaacaaggaacatatgaattttgagttcaaaacgaagtgcttgtccaaaatcaaatttccttgcccacgtgcaagtgtaatcaagtttgggcaaggaaaccaaacataacaacaacactggataacctacatcaattgtatgatactacttccaacagaagcaagagcgacaaatactgttaacgtgacagtagaaagaaacctgcaaacagagcgggtagctatccccacttgaaatttccagatagtaagccagcctcttggtttccatttccatactttcctcaacctgtaagacaccataatcagcagtgtctacaagctgtagaagaatgccattgattcctacaatattataaatatattgaccttagcaaggtaatctggcaaggagtagtgcttaatccattcggaacttctcaccgagtagtagccatatatttcatcaagaaaagcattttgcattatggattttgcttcagaacaacatatgccatgcataacatcccgaaggctcgaatccatcctgatcccatcacgttcttgttggatctaggatcagcttgaatgttatgtacagaaggaacacgttgaacaaacaaaaggtgaaagacagctatctagaaattaccatagtaagaagagccgttcttgcttcatcattgaagtaggaaaagacctagcagatgggcaaaagacataagaagtgggtaagcagtcaccttcacaagcaggaggaaatgtggaagcaaaacattttcttgaataacactcactggatcaaagaaagaggtagcagcagtgttgctaagcgatggtagtttgtactgcttcacatagcagcggtccaaatagctgaagaagccaattacacatctaatcatgatgcaatagtttgaccacattttcacaagctctctgaaaaagctgtcattttgcttgtgcatgagatggggcagaacctaatatacaaacaagagtgaaatatgtcaagacggggtaaaggaagatatccttgccaaaatcaattaacttggtaagcatctctaaaccgaattgtacacagatacatggagtatatctgaagtgaggtatttcaataaaataccatggttgttctacagtaaatcagggtggtctactacagtaaaatgtcattatagacgtatactgcagtaaagcagggaaacaacagtaatgcacctcctcctttctcactctgatccatatctattttgtttgtggcaaactgttttttattttgtcaatgaaaatttaggtaggagcctcgcttccagaattcctaaaaacagcaatgttttatcatgttggtatatgagtatatgaccgcacaaatatgcacagttacactttcaagtttcaaccatagtagttcactactgtatccactttatttataatatgagcacatgcctatttcatatcacatcaacatatcacaatcaagtgtaaatttgttgtgtaagtgtatctgattttgttgccaaggcaattagatacacggtggcttttgcagcaattcctgctagtgtcagctcgtaatttgcctcaaatcaagcaaaaacacgatagtaaaagaaaccaaataggagtataggtaataaatattcaacaaatagtactaacagatctaagcttcaatttttatgggcagcaaggctctggtctagttgctgtggaagtgtggatctatactattaaagatttattagccagggttttaactgaggacaaatatagaaacaacacagatacttgatgaaataactcatgcatcacaagatttcatacactgaagcagagatataaaaaagttagaactgcacccgcagtggtccttatatgattcagttaacccttttcagcatcagaactcgagatgttcaactctagaatattttacctcaactacagtagatcatggagtagaaacaaaaaaataattatagtaccattgtgcggacacattctgcaagcatcatcttgaaaccattgtacatttctggacagtaatgttgtttctgcacagccatcctgtaagcacaactagaatagtagaggaacaaatgatgagctgcaactttaagtaacacatggataatagtaaagatatgcacatcgtcttgaagccatagaagcatactcatagtagttcatgtattcgttcacggtaggccttgtactggtgcactccaaaatcttcgagcattttacaatcccctgttccaggactttccagccctcctcgaagcttaggtggttgttcattttgctaccttgttctgacacagctgcactagttaaaaatgtatcagaagtgtttttttttagattcagcaataacagaagaaatgaagcaaatattagatcttttcagtgtttacaagtcgtccgactaa

SEQ ID NO: 444 - DNA, 1101 bp, Zea mays
tactgctgttaaagcaacagctgatttatatctgctactagttggtggtatctaatagtttgcccttcagatttacaggcagtctggtgataagcaattggcaaaacaagcatttgatcgagctcgaagcattgatccatcgttggccttgccatgggctggaatgtcggcggaaaattatcatcaatctgggtacccctcacccctcgattcatggaaaagttttctatgctgtgctctgaaaaattagttactcaagctgttttttctatttcgtgtgattttaaaggagcagtcctgtaaatgaatcttttgaaagctgcttgagggctgtgcagatcctacctgtaagtgcatttttttaatatcaataatctattcgcttgttagtataacaattttctgttttttcttctccgagctagccctgacttcattctgttatgttattgcattagctgccagagttccagattggtcttggaacaattgcagcccgttctagtaatcttctgtcacctcaggtatatttccagttttgtattcgtggttgagacttttaggtggcaatggtgtatccaactctatggcaatttttttagttgaccttcattcttatattctacattatgtaaccgattgacactaagagatacatgatgattcgctaaatcataaagatatttatattgcataatctactacctaaaacctcagtgcctgtgcttaacaaatcattttcttatacttggttccattatgtaggtattgatggctgtaagacaggctgttcaacgagcacctcattatccagagtctcacaatttaaatggcttgatttctgaagtgcgattagatttccggtctgcaatcacattttacttgcaagcgagatttgctttaggcatgatgtacaattccatgtcagataatagacaagcctttgctgatgtttcagtgaatcttgcccgtgcactatgcaaggtaagattgttaacggctattttacatctgctttgatgaagttaaacatattaagcaggtaaaatcatggtgttttggatgatacatctgagattctaatcatcatagtcgttaagg

SEQ ID NO: 445 - DNA, 2215 bp, Zea mays
gcagcgctggagtgtgaagagctgagatgtcaaggtatattgtttttatttcacttgagcaatggaagagttctgttccctaatttggcagatagtattgacagcagaccctttcaaaatattttccacatgcatatataacatataaactaacaagtaattcatcctaattttgttaggactgttgagcgttgatggattgcagatatatgctctggcattgtggaaaattggacaaagcaaggaagctctttctgtatctggaagcttggctgaaaatttaagcggtataaaggtggagagtgccactgcagcttggggattcatatgcaccttgacgtatggaatttctgggaaggactctgcagctgccatgattcagaagcttcctgatcaactcaattacaactcacagttgaaattcattatctctgcattggatgctttgcatccaaccaaacgtctccagctgcctcagttgaatatgcctcctaagcgtacagcttatgaagtgatgagtgaagtacactcgaatattgctcttgggaaggctgtaagcattttaaaatactgttctatatttctatggaaaactagtttattttgaatacatgcttgatgtactaatatatataaaaaatccttttagattggtgtgggatttgacaagcctctgagggttgatggtagtttgtcttacctgaaaaaagtactgcacatgtatcctgactgcagtttagtgaggtgattttcttgctgggaatggtcatatcaggtgttcaaaaggttactaaacttgaggctcgagtcaaaatgttgctcaccattttctcatgatgcagaaaccaacttggatccctgctgctgtggagtggagattggatggcttctcacaaagcaataagggttacctctctgtcacatgggcacacatccagtatgggcctaagatcaccacatcacattcaagcctgtgcaatggtttcttgctatgctacctgctgcacgtacacaaagttctcttttgcaacatgtgaacaccagtacctaagtggacctgatgcaatacaccacctgcaaaggtacatcttctacttgttgcattgacaatgtatgcctttggtaggagagctattcatgctatttttttgccttcaaggtgggttcattgtgaaccatggaaccaagatgcacgctacctgcttgtacttgccattttccaaaaagcacatgaagagaagtaccccaaacatacctgtgttattctgaagaagctcattatgcaagtgttgtccaatattagcaatccacatgagaaagaagctatgcagtatcaggtgttcctgctacttcttctgtcatcagaggtctgtttgcaatctttagactatgaaaactgcatcaccgaagctaaagaagctctaaaactcaccccgtcaagccgtgtggatactttttttgcaaatttgcaactgtgtcgggcctatgtggtgcatggggatcttttgaactccaggaatgagtacatgaaatgcttgagaaaccatacaaatactgagattggctgggtaatgctgaagcaacttgaatctgcatgttctttggagggcttttctgacgaaatagatataaaactgcatgaatgtgttaaaaggaatggcagcgactcatcaaaatggacatcccttttcaatctggcgtgtgctcagtgctttctgtggggtggaaactttgaaagcgctgaaaaagctcttgctcaggcatgtagtcaagtagatccggatagctgcatcttgttccttaatggttagctgctttcttctcacaaagctcatattagttgtcaagggttctctaactcctttgctgtttatggtatgaagcaaaaccgtgaacttggttgttctcttccctccattagaatcctggaataaacttggttgctattggatcaacaaactttctgccagtcttattagattttgatatacattccttgtactggtttttgaatgctactaactattcgctatgctaatagtaaattaaggaaagcatgtgcttagatgttactttgttgataatttattttgtggaattaaattgatccaatctttatcgatgctgtgtgaagaactctgcttctaaattctagacctgtgtttatctgcatggtctgggacacagagtatagtatataataagccttaccaat

SEQ ID NO: 446 - DNA, 514 bp, Zea mays
cattttaagacttgcttgggcccggccaaacccatcaacagagagatatctatgctttccattctcaactccttggctgttctagatacagagctagtatagacatattgtaattgtatagcaaaggccacgaatctttaaaaaaaactcaagacattttataatttaaaaccagacaaagctttatgatttaaaacgggaacagtaataaatgtgcacaatgattacggtcatcatcatcatcctaaaacagcagcaacaaatgccactaataccataccaggttacaagcagagtctccaccgacaaacgcaccacccactcatttcattccgagcaaaccaaccaccggacttagccccacatacacaaacaatccacggaggaaaatcaaaacagagcctagcagcagatataacaagagtctgacaaaccgccccaatcatggggccaacagttccatcgccgccacattcatcagtcgctgatagcaggcgacgccgaccttgaccgt

SEQ ID NO: 447 - DNA, 629 bp, Zea mays
ggctcctcatcctcctcgcctgctggggacctcttcctcctgtcatcagcatacaacaagctgttactaccattcaacaaagacacccatctgaagcagctactcctgctgtgtatatataatgaattctattttaccatataaaataaaatacacctgtaaagaatgcaaagaatgtgcctgaatatacattaattgtgcaactgtacaagggatgtccaacagcagtattgctcgggaaaaggcacttcacatcaagctttacaaaattactcaaacaaataaaaggcactattccctgatgtcctccacaaagaagtggccacttctcatttcttagtcaaacaaatgtttagtttaacaaccccaaaatgaatgttgcatgttacagatgggatgtttctcaacaaaaataaccactcaataggatgcacaatatcactacttcaaaacataactagactaacccatagacatgtaccaacagtcaaggaacagaacttactcatcacgaccattgtctgcaccacggcgatcatttatatcatcaggagtataggatctcctcctatccctgttattttctttaggctgttttgatgacctcgggtgctcttcctttgcccggg

SEQ ID NO: 448 - DNA, 582 bp, Zea mays
taggtaacatcatttcgaggaacgttactgcacttgtacatcatggttggtccattacttattcaaagagactcaaaactcgcagacatactgtgatctaccacgaccacgagggcgtggtgagcgggaacgcgagtatgaacgagaacgggaccgtcctgcacctaaggaaagatagcaacttgtcagttttcaaacaacttacaaaaccatcagttttcaacaacacattttgctaccagaagatgcaaccttcaaacaggcaatttagataaaaaaagatatgatacaatagaattacaaaaaatgccaatcatgaaacttaaatgaacaaaacataagtttttttatcccctcccccactccagataaaacaccaacagttaaaaaagatatgatgcatactcaatcattcatccatgcatctcaaataataggacaaaacaaagcaaataacttagattaccatgacgattcggacgacgcccttcatgaccagaataacctctgcagaggtacaacttcagtcattttaagtgaaatacagatagtgcttccagaaaacaaatgcttatcggcata

SEQ ID NO: 449 - DNA, 1117 bp, Zea mays
ccagcaaacatctggcgattcatgtggtactgtgcctcagaagcgtcataagcatcaacgaactccacgaacccaaatcctcttggctccctgaatgatcacaaaagccttcgtaagtaatatggcactggtaaacaaataagatggcacataacaatcaaaaatagtatgtgcctcacgagttactaccaggctttcatattattatggtgaatcatttatagttctccatagagcatagctaataacttacaaacatgttcatcaaatagtagcaagcctcaaaaagtgattaggagcccttagatccaaaatttcttgtatacatcttcgtaaagtgatttgcttcaatttcttcgagtttgaaaactcatgaaaagttcttgagaccaacttgtcttcattatatattcccatggaagacacggtcaaaccctcttctcttcaggaaattaacaaattgaatcttgtcttgataaaagaacttcattctcacaatactctatctcaccaagcaaatgaacgactaggattgttcagggcttgtatttacttcaaccaaaaatacagtcctgagaataatttgaagagagtaattcgtaccagaagaaagaatcatcatataatgtaaataaatcctatacacaggaaattaattagtgaagttcaacagatggttgtattactagtcttattccacatgttttgccttaagctatcctatgatgttttatattatgcagaaactgcataaaaggaagagaaagggaatggttgagttctttttatgctaatttgctaagctgcgacaatcagtccattttttgactgcaccatcatgaagtatatgtgtgcaatccgtgagcctgtgacagtgtgtagacatccagcaaagtgtacagcccaagcaaagctttcagtcgcatgcaaacatttttagcagtcttaatttcaacatcatggccaaaatataagatccaaaaatgctagctcctaaaaagcagcagaaagcccccaaacactttcgtagaaccccaaatggttagagatgtttatatccaaacatggaaggtgcaaaagcactttgtagtgcagtggcttgtgctcgccacagttc

SEQ ID NO: 450 - DNA, 1458 bp, Zea mays
tgatggatgaagacgcgtattccggacgtagcgagcgcaaggggatgcagtacaccgtacgcatgtacgctcagtgccctacatcctcatactgctcgccatttctccagcgtgatgaatgaccgcagcttcttctactccatcaaatgagcaacgactggctgtttccttggacttgggcaggtgagaatgatggaaaaagtaaaccaaacgccaagaaccatttaacaacaaacccacgagagaagcaagctaaccacatcaggtcaggtggttctgtgcaaggcgaccagaaaagctgaattcagaagaaatccagcttttagctgccaagtttccaatagaatctttactaattatacttttacaacacaagctggaacaacagcgaaagcaacattctggcataggagaaacgcatggcatgatccttttcgaaaatcctcagaagaaggttgtatatgccctcaaaccgtaccgctatgtattgactaggcaacagatgtacaatatgcgacagggaaggaatgcgtacaaaaagagatcgttttctgacattactgcatgcgaacaaaaaacaaacgcaattctagtattctagtaaaaaaaaatcaaacgtctaccacatagcgagttttgtatcatatatgataatgtgttcgaagcaacatgatagcaggctggatcaggattttcgtcagtgcatgaaccctaaattcacgaattttattagcatagcatgaacatatatacagattgatgtttgatgatgatatttattcagaggctcacagagtaaccgatcgagtaattttaggacagacatgttcacatgccaacttggcaacgaagatagcagacaaatcaacattcgtttagctcatgagcattgatgttccagctcaccaaccatccgaccagtgatccggagctacaaatctcatgtgcccagttttttttttttgtgtggcttaattagcttgcgcacagttttatgggatcaggtgggttgggattaaaaaaaagtactacacgtcgctcgttgacactgggacaccaattctctacaatccatctagccatagtttcagtagcaatgtactcgtagagtgtaaatcaccaggagatactcgggcaatctgtatttacacttatcccttgctccaacttttacttcttctacgttacaaaatcacaaaaaactaatcgaggtagctgtgatttccatccaaacaattttttttttgtaaaatatatcctaaaagcaaccccacagtcaactactcaagcaacccatcataacttcacacccaaacaaatttttgtaaatataccagtatgtccatcacctgcggcgcctccggtcggcggcgtactgcgagagcgggacgagctcggaaagcggcgtcgcgagcggcgtggagttgggcgtcgggatgggggaggacctgcagacgg

SEQ ID NO: 451 - DNA, 3417 bp, Zea mays
gctcgacccccaaacccctcttgccctagcgctccccgcccctgcccctcgccgccggcgagatgatccccgtcagtgccgatgtcgctgcggagctgcgcctcctgtttgaatgcgctacggactccaacttcgactccattcggcgcgagatctgccaggtacccatctgtactgctggaccctcccgcttcctgccagcgttacgcccccctccctctcttcgattcttagcttcccagtctggatccgcgggttctagtgcgttctcgccaatgctgcgtcgcctgcattcttgtgagcgcgttcaattcctccctagcttaggatatggtagcgtttaacggtacgattgtcgattctgagtttagatttgttagagttgcaggccacaagttcagcgctagcgacctaggttaacacaagtgggtttttgggacttatggccgcgcttaaactctgtatgaatagttaaggctcattcgcttcactagctgatctatttcatttcctcaatcacagagctcgtggtgactttttcattggcagttttagttcaaattctcgttgaaccacctagtgggtttttggacttatgaccgcgcttaaactctgtatgaatagctaaaactcattccattcactagctgatctatttcatttcctcaatcacagagctcgtggtgacttttcattggcagttttagttcaaattctcgttgaaccacctactgtagtttcgcaaaatagagcagtttacctacttgcttgataaaatgagtttcttctttggcttcgatcatatcttagttctaattactgaatactgagtctgctcgatgttttctaattccaattattttccccaccttttcagttagttgacagtggcctggatggatgcattttggtgctccgagtatgtctgaatcaagtgttgctgaatgctggggaggtcaagaacctccagttgcagttgcaacaaaggcttttatctgatgttttcagatattgtttgcgcaagacatgcttcacaaccagtttttgtgaggtgctgacaacaatagccttgacggatgattttcttgaaagtctgtcaaatctgctggaactctcagttgccgagaaaattggtgttgggcttgcgctctcagattctgagaactcagagataaagcagaaaggtagacatttctctgtgagtctagtgatatcatatccgcttctcttattttcagatgatcattgacattgcctcttgttccagggcaatggttttcaattgctcaaattgaagagctgtgcatgaatcctatccaatctgtatcaaatgatcaaattcatgaaattgtcgtgtttctgcatcagtatgatggcctgttgaagcatctggacactttaaataatgttgtatctctactaaaagtcacagagaggccgttttttgcacctgtcactaatggagattttgatagacaaccaaatctttcaaggtattcagtttctgactaatcaaattctgaatatgtgtacttcttcattcctatttattcacaaatgctccccctctttttttgtgccatgtagacatttggatatgtacttgggtagcacaaatgatgattttgagtcacttctgtctgaaatcgggaaagaaataagcatggctgacattgtagctgagttgggttatggatgtactgttgacaacactcgctgtaaggaaatactttccattgttgagcctcttgatgatgtcgccatatctaagttgcttggggctgttgttggcactcatagtggtcttggagatgcccataacagatatgcaacatttgtatctgctattcttaatagccacacgaacgactcatctcagctgactaaatggaacgcagatgttcttgtggattcaatcaatgaactcgtaagctattgacttcttgcttttttattggatgttcttttttttatcttgcacccttacgctctatctctctttaacacgcaggccccaagtacaaactgggtgcgtgtaatggaatatcttgatcacgagggtttcaatatacctgatgaaacaggcttttacctattgatgtctatatacacgcgtgcttgcaaggtatgtatatataaacatttctattcttggaaaatcaactagctgcttaataaattaattggattatacaggatccatttccacttcatgctgtttgtgggtcattgtggaaaaacagagaaggccagatatcgttcttgaagcatgcagtttctgcttcacctgataaatttacatttgctcattcgtccaggcacttggtaattctgacaacatctggcatcttgataaaattctatccaattcacacctaacagttgtcatatactgtaggaatttcaggatttggcaggtcctagtcaaggcaatcatgcttggtcctgccttgaccttttagaagttttatgccaactagctgaagttgggtacgctacatctgtacgatcaatgcttgagtatccactgggacattgccctgaactcttacttgttggtgttagccatgtcactgtatgtatttctattcccacctaatgggtttgcctctagtttcatgactttaatagtgttaagttccccttatctctttctttttggtgttagctgcatcgacgtatgcatttctggtcccacataatgagtcgcatctatttttatttgtttttagcagtgctataaattccccttgtctctttgcagaccgtgtataatctccttcagtatgaagtactgtcctgcatatttcctgctctactgaaggatccaacaaagcacaatgttatgaattatctctggcatacaaacccatacttcacccttcgaggttttgttgatgctcatagtgatccagattgtttgctaagaactgttgatgtttgtcatgacttgaaggtttgtataagaggaatgcactttattttctgaaattgtatcgtatcaaaacttatccacatgaaagtaactttttttttcatctgtttgttattgggaccatgctacaatattacttcaatgctgtaacactattttctcacaaatttgtttcactcaacttttatttctactttaaacagattctgtcttctgtccttgattctactccatttgcattttctataaaattggctgctgctgccttgaggaaagactatagtcatcttgagaaatggctgactgaaaagttatctttatatggaaaaggtttcgttgaggtaatatgcataatctattcttgtaagctgctacatttcagctgacctgtggacaagttgtcgcggccgcttctatagtgtcacctaaatactagtgactccagcgtaactggactggccacagttaggccgcaaatgtaa

SEQ ID NO: 452 - DNA, 1052 bp, Zea mays
acccgtcgtcgtcgtcggtctggctgcccggccacctcgatgcttagcttatcgtcatcaatgcggaaagcaagcgtgtccactcagtctccgatcctgttaacggttggacgtacgcgtatatcgcgttgttcatgagtcagtagtctctgactgttgatttcatttgttggttacgaacagttgacggcaaaaggcattttttttttgcactcctctgcatatttttttcatacgaagttcgaggtggatttcatccacagcctttatgtgtacaacaggaggcatgcgcgttcgcccgtgcatctggttcacacaagcttcgatcaaacgcgcgtacgtttacacgttgctgaaactgttggcgtacaacagcaacacgtcacgttgttgctggttgcagccgtttatacgagtattagttctgggcactgcgcaaactaaccgaaagaaactgacacgctcgcgttctgaaatttccaacagacagtgctcagtgctcaccttggaatggaagaaatgttcttttttcttttcttttcggatgtgggcttgagcggatgtgctcaccttggaggtttcggttctctgcatttttgctggttcaaacacgcgtgcgtgcgtacgtggaccagtacgtatcagcgtcccgtaattgcttaggcgccactctactacgctacgcccggagatgacgatttcgtaggcagccccctccaaagtcatcttgtaacgaaatccccaaaattaattggggtggcacaccgcattactatactagtactagtactgtagcgtatgtaatggcgcataatatactactactactgtctcccacggggctcacaacacaacgcggctgccgtgcgcgcgaagcttcgcgcagccgggagcgaacacggccgcgcctatatatatgctcgcccctccccggctccggttcgtactgcacgagaacctctttgtccattccagtttccagactcctccagacagcagagcaaccccgaaccgcgcgctgagctgagcgggagcgagtccatcggccgcaa

SEQ ID NO: 453 - DNA, 1202 bp, Zea mays
cgcgacgcccagctgcagctcgtcgccgcccgtggcgccgcagtccagaacgccggctccggctccagctccggctccgcgaccgcgaggcggcgtccctgggagcgagaggccgacgacgacgacgcgtgcgggctcgcggccggtggacatccagaggcccgcgagctcggccaggcgccggggccacgaggacggggaccgcgaccgcgactggagcgccgccgccgcgacgatggtgccgcctcacgtgctggtgtcgcggcggcggcaggaggcgccgtgcgcgctgctgcggccgggcgcgcgcgagctcagccacctgcgcgactccgtgctgcgcgtcaccggcttcatcgaaggctgaccatcgtcccctcctctgtttcgcgcacatgcagtgttcattcaagcaggactcgtcgactagtcgtctcgtcaccattcaccgtttttttttgggtctttgtagttgtatgatcggcggcgttgcctgtttcgttcgttcgttcgttttcctgttggtccatggtcacgatgcacctccacttgtaaagagagatgactgaactcgctacttgcttgatcctccactccacccacctgcattgtgggcggaaaacatgtacgtgttcttcgatctgaaaagtccagtctgaatgtgtagaagggttaaactcgaggaaaacgtgcagattattagcatcctggttcttaatgtataatacaactcatctccacgaggcacgtacaagtttccattcactgccacgggtaaattaaacccgtctgtttgattactgtagctgcgccctaattcacttattccgcgtacacatttctcagcaaggacttggtcacttcgatctataccattccatattgattcaagtttagccaaacaaattcttggcgcaaaatgcgtctaatctaatcacttgagcacgaacaaaacgtgcaatctaagcaggctgacaattctggatactgcaacagtgctagcttcttctttttttcaaaaacacaagattagctgcccttctttgtattaaagagagaaaatatccccacacattacacatctcattcggggaccaaatatgacaagtggtcatgttaaatcacatgatcaccatgaatgaaaaaaaaagactcaaatgaacgtgtataattcaaatgatcaaacagtagtactctgaaca

SEQ ID NO: 454 - DNA, 1292 bp, Zea mays
aattcataaaacatattcacgttcttgcttctatagcacaaatgtttgcatctagatctttcactctttttgttgtagtttacatatgtttcatcaggttttgtttctgtttgccaaatgccggcgagatgtgatccatcgtttcagttttataagcacgaatttgtacttcttgcatggcagactagacattaattagtcttctctagtgtaccctatagtaataatgagcgtataacattagctataaatagcgttagagtacttccggtagtactattccggtcaccattggcactactccagacctaagtagagttaggatctaccttgacagcatcatatttgtcatgttaagctctacatgtctcaacacttctcatgcccaaactgatgaaaaggtacagtgcaaaaggagccaacagcacattattggtggtgattaaaggtgtcagcagaaagccagcagcacattggtggtgtagagcagcagaagtatagtagaatgagttcaccctttccattgtatttatacacctcgagaaggtgctcaaagacagacagacagacccttgactggaggagtgatacattcattttgctgaagaaatgtggttatggcgcctgaccttatgtcgtcagtgccagggccctacactagtacactcctactgcaattttaatttcacccataaatttatattttccccatacatatctcaataccaaacatgaataatctgggatagagatgtatggagaaaaacaaacttatattctataatgaaaaacaaacttatacctttagtactttaaaacaccaatttcctgtgtggtacgttttctcttaacgagctattacactacagataggttctaaaatgagaagtgtgattttcaacgtatttgtccatgaatttcgaaagttacattattccatccactcttttcgtgtgcagcataacgacattgtgctacaatgtttacgacctgctaaataacaataatagcataaatagttgattatgttagtcgtccagctaatcaagtcggtgaccccgccgctacaaactgcatgcagaagcagcgatacttcacgatgcttcctaatctaagttgataatggatacaaaacatgtggtttagacaaatattgcacaaaggagtggcctctgctagtgctagcagtgctattggggttttattgtgaggcaccgatgccttttttttgtgagaatggtacaaaccagagtattgactacattgatgttgtcgacctacctgtcatttag

SEQ ID NO: 455 - DNA, 509 bp, Zea mays
taagacaccgatagactcattgatttgtttattagatttccaacaagctgcacaccaagagtaaggaatcagcacaccaagagtttatccgacccaaaactttacaataaccagaataagcattgattcatgcatttcatcaaacacttggtggacgatgtgctacaactttcctttccaatcaaaccctaggatctttctctccaccataattgcacacatatacacataacatcacataagcattgataggatcttttttttttttttgagacacttgaatggtacaaaccagataatagactacattaatgttgtcgacctacctatttgttacttatcctagtcgacacaatgaccactgacaaaataaaataaatgacgacatcctcaagtacatgagtaaaatgagcaacaatacaaacaaacacggtacaggagaaatcactaaacatgaaaacatactacataacaacagccgtccgattagtttctacggcccagattag

SEQ ID NO: 456 - DNA, 597 bp, Zea mays
aaattccgatggccccgagacatccctgccccgatccaaccgaggccatcggattggcatccagcggtcacattttaatacgacgaaatgctacgcgccgcatgatctcagtcgttcatcacttttcctacggcgctggttccatcacctacctctcgtatcgaacacggaagcgcgagcagtccgcgtggcagagctcgccgatgagcgacgtgcatgacgccgatcaggccgaagccgaaccctatggatgactcgctctacgcgtcaaggactcacaagcgcgaaagagacgtgtcacacgtcggggtcggtccacgatgtggagcggaggtgcggcgggggcgagaggtgctcgggctgatccgcgagcttgatacttcacacacacgaaccacgcacgctgccgaacgcccaccacccaaccttggccaccaatgaacggtgtaggcaggcatggggcaccggcggtggacggcagacttctttctcggtcacaggaagggatggctggctcaacaggggcgaggatgcatgtgtcggtactttacttatgccccggccgtggctaggatctcggagcgcctccacgttcaa

SEQ ID NO: 457 - DNA, 3078 bp, Zea mays
gtgcgcgctcgtacagtcgtactcgtacgtctcgcctgcggcctgcccccgaaccactcggccgctgaacccgccgccatggacacggtctgcgcgggggttttcactgttcaccttttcacctgccctcccatggccatggctatgattgcactgcgcgtcgggcccatcgattgacacacccaaaaccgccttcacttgccgggaccaatgaatgcacagcgttaactcgttctgcctttggtcccgcggcgaagataagtttggggcaaaaaaaaaaaaagatagagcagtaacctgtaacaaggactccagtacgtacggcttttagagttttcgttagtaccaatcaccatctgtttctcacttcgtctcggctggaacgcgacgagcagagagccgaaccgagcaagcagaagcagacggttgctcaggatctctgaaacgacaaagccaaccccgagtccctgacacgagaccatgacccctgaaacaccggcctcagaccatgtgccgcgtgccggacgagcatgggctccgttcgacctcgaccggcccatgcgcgtgcgggcatgtccccagggcaaccatgatgcgcgtccccgtctcaatccagcacgtgagcacgcgtgtcgtgtgattattttgacctgcctttctggcacgatcttggtttcattccaagcaatctgacaaaaagttcagtgattcgggcaaagtatctttgcatacgatcataggccactgccatgctgttgggagatacagtacgagcaatggagatgccctgttgatcttcctttagccctttttattttagacgaactcctctttaaccttttggggatgctgatattgggaaggacaggaagaagcattagcctattgtggtagtaggtacatgaaaatatagtgggggcaaagcggcatgaggagggaatcagatttgggtggcagtggaggaatattttttatcaaatacggatgtttcactttatagattgtcaccagagttgaaggataaagggtgacactgacatttttttcttaatctgtcctttggtaactttaagggtatatataacactagaatctgaacagcagacagtgggaagtgctacaaaacacatgcaggtcctgttcgaaatgcatgaattcagtaagaaactgaatgcacaaggcttcaacttgtatggaactacctcgttctatatttctactgaattttcggaaggcttcactgtgtttggccaaattcatgcacctcgcagtttagatttcgcaatgaatgtcaactggtaacagaagcttctgtccctagaggcctagacttcgccaactggaatgtactgatcattaagtgtcgagttgttttgccatagactagcgccaagacagtaactcttcagcgacaaatgatcaaatggtgcttcttgatttactctttatctcttcgtttcccgaactgcagctgaaagcctggggctgactcacctcagtgcgtacctgaactcgatcggaagcaacttcacacagggagccaactttgcaacagctggttcatcgatcagaagacagaatacatcgctgttcctctctggtttcagccccatttccttggacgtgcagttctgggagtttgaacaattcatcaacagaagccaactcgtctacaacaacaaaggtgacaacagaaaccccccaaaccatctccatcagtatttttatgttttatcccgtcaagattttattcagtaacacttactcttctacatgtaggcggtatctacagggagatcctaccaagggcggagtacttctcccaggcactttacaccttcgacatcggtcaaaacgacatcacctcaagctactttgttaacaataccaccgaagaagtcgaagccataatccctgatctgatggagaggctcacatctgtaatccaggtgctctttggcagagcaagcatcaagttgctgttgctctttggaagatgttaccacacacaacgttccatggatggtctgctcatttagctgaatacatgcaaatttgcagagcgtgtactcgcgtggaggaaggtacttctggatacacaacacagggccgctcggctgcctgccctacgcgctgctgcaccgccctgacctcgccatcccagcggacggcaccggctgctccgtcacctacaacaaggtcgcgcagctattcaacctcaggctcaaggagactgtggcgagcctccggaagacgcaccctgacgccgcgttcacctacgtcgacgtctacaccgccaagtacaagctcatcagccaggccaataagctcggtaaggcgttcatgttggtgttgtttctaaattctaatgctggctggctctgaacgtttcctcgcgcggaaggagctcatgtttgtattgtttgtggtgcaggcttcgacgaccctctgctgacatgctgcgggtacggcggcggccggtacaacttagacctgagcgtcggctgcggcgggaagaagcaggtgaacgggacgtcggtggtggtggggaagtcgtgcgaaaacccctccaagagggtgagctgggacggcgtgcacttcaccgaggctgccaacaagttcgtgttcgaccagatcgtcgccggcgcgctctcggacccgcccgtggcgctcaggcaggcgtgccatagcagagggcaatgaatcggccccgtgtcgctcgccgcgatggccacgctgcagctgcagctgcagctgtttctggctgtgtaactttgcaagtgtaaatcgaaggagcaagcatgctcgaggacgaggtgcacggcttcactttgtaataagggacatgcaaatcagagatccaagagcaatgatttccatcaatagaggatcgatgaccacgaaacaatagcttacgttgtgaaggattgaaatatcgatcatcacaggcgccaatttgtaccgatacagagaatgagcaaacgaaatattttagacaggcatcgccaagaatgggaggtgggtagaaagcttcttggtattcttaggacccgttcgcttgtatagaaataaatcgaa

SEQ ID NO: 458 - DNA, 2529 bp, Zea mays
cgacaacttgtccacaagccggcgctggagcaaaatgacttctataaccaagctaagcagggtttctaataaaaccaccagcaacaagcttcacgttaccgaaaccactagcagggtttgattatttttttctctcaaaaccaagcagggtttggaatggtctgtgtaagcatgataagttgataggaaatgctgcgacggagattcagacacaaggtactgctcgtaacgaaattcttacctttctgaagaatgaatactccagacggatccaacccatccatatctccttcttggtcagtccagcacttgaaccttttcaagctcccaaaaaagtctatcagatgctcgaaaaaatttacagcgaccaatagggtataaacaaccataatgagtgggtagattttgttgaaggttctcccgaagaaaggcacgacgtcatcaatgtttcccattctctacatattagtataagaggtgatcagtcaagcagtcaacaactgggacatatcttgtaattgttaagattaaaaatgaaagaaaataacattctgcacttgcaatgaaaaaacgtgtcctctaaacattctttttagagaacttctatcttctgttggtatctttacggttgacctactgacttggagtaagggctgtattttaagtatttccttatacacaattaaggagatgaacttaattattttagagcactgattatatgaaagagcataaattttaataggggcctgtatttggcatgaaaactgtaaacttgcaatcaattagtgttttcctacttctctttcctggtgtgcacaaagatcatggtatttttttcctaaatatcaaaaaaaaatcatcattttccccctgagcaacccaacatcgattatgaaagtttgagatcaagaatgactactcaaatatcacatattgattttattcattgccaataatgtagtgaaaaaagtacaagcaaggaacatgcaaagaataccttttcaaaagtagttttagcattaccaccaaggtgaatgagattcaggaagttgtaagaaataggtggtgcatatcttgcaaccattctgcagtgaaacgtttgatgtaaaaattggattagaatgcaggaaggtgcctttaacgattaatgccattcaaagtatcaaaagatggaattctggatcgcttacgagcagatcataagcaagctgactgaactagtttgtcctggggtcaacgaatataacagcatcatccctatcctaatcagtgaatagtatgtgcagatgcacatatacatcaagggaacaaacgcagcaacctgttaataggcaagtctaatcagcaaaaggaataaggttaaacttattgttttggaaaaaattctttaatgaaattataccaagcagaaagaacaacagtatttataaaataaaaagaatggcaaggaaccacaatgtttgatcctctaccaaaaaaaacagattttgatgacccaccaggattttttttcacatgtgaaagcacaacagttgtgtatatcacgattgacgaataaaattgagaaacaaaggattaacaaaatctcatgcaaaagttatgtttatagaaacgtgtgtgggtgaaagtgagttccatgtgtatattttactccaaactaaaagccaatgataacaaggaaagctgcagcaactgagtggcaaatttcttacctggactaaaacttcttgctttcctgcatttataagattggagaaaagtgacagatcaacatcacttggcagcaaagtggcctcagccaacagtatggaagccgagacacatccaaggataacagcaagtactctcataaattgctttctcagtaaacagcgccaaatgaactctgaaaatgtcaatgtgcctttgaatcagtaccatgaattattgaaaattcagggtggtttgctcagaaccctatatgcattggatatgatacatgagtgttgtgtataacgtatcttcagcataaggtttactgtaaaattaggagtcatgaactaatctgaaattattgactatcagtacaacttgtagattcttgcaagacaccttcagctgttacgttatattgatagacacataagtttttattggagaaaattacctatagagtcaagaaaagaacccagtgtgcctgatcgactttccctgaaacttgacagatatttcctgtaaaagttaataatgaaatatccatgagatgcttgaaacagacctctcagaatatttcttctgacgataataagttgttaaccagcttgcaagacttggtgactgagacagttcggacaaaacataatgcacatatgctctcaccacaacagcagacatgccctttatcttttttcgaaagaatgtttaagaaacataaaaattggttatgctactaatgctagtttatactttgtattcatcaattatctgtcgattaaattaaacctaaaatcattatttcttctaacaacaaaaatgacaaataacccc

SEQ ID NO: 459 - DNA, 526 bp, Zea mays
tactgtcatgattgggaagtagtcgcgaggtgtgttaaagtataggttgcagtataattcatatgaagaatgcattagtgggcatgtgccgagtataattgtattggtgctacatagatggatttaatagttcaaatgcttagccgataggttctgtcaatcttgtaggtgttaagtttgtttatttggggaaatggtgtcttgcctaatagttttcacatatgccgtgtctatagaattggttgatgttatagactttggaataggagtttggatgttttgttgtttgatctttatgctagacccggttaagctgaaagaatgtaattgtcaagattgcagttttgcagggatccatgcttttgctaatgtgttatccattggatctaggaatattgttatgtatatgatagcttggagtggtatgtaatttagtccggtcacgtggtctagaaagttgatgtgcttatgttcttgttttagatttaaatttcttagaccaatgagtttaaaattattaagtttt

SEQ ID NO: 460 - DNA, 1919 bp, Zea mays
ctccatttttactttcataaaaactctacatctttgtcattgattttctatgcgttaaaaaaataaacatttctatgatttacagaaaaacataatactcgttaaactatgaaaggatcatgatagatacgtctaattgatgcctgctatatcctaaggttggacagtcttcaccaaaatcattagttgcatgaaatgacctcaaataccggccttcatagctgcaagaaagaacaaaaaaagttcatgaatcaaaaaacaatgcatagacattagaaggtgtttatctaatatgagaaggtaatcattaagtagaatttagtgtgttctcttcgaaaagaatttggcatataatatttatactcacaaagaaaatgtgttttcctcataagaagcaccaaacctgcaaaatagaagtgaagcaaccgtttctttgcttgtccattcttcataaaatgtgattcatcagctacgacaatttggaggaaaatcattaagccacgtcacaatcattatgatggtttttccctaatggaagcaaatacagtcaaactaagccaaaaattgtctgaaaccaatttgaattgttttagtttttcaggaaacagaaggcgaggtagttacataaaggcaaacaattttaggaaatagcatgatatccgagttcacatatttaaaaatgctattagtagctataaatatgtaaagataaacaatttcaggaaataacatgacatcatgttcacacatttaaaaatggttttagaagctataaatatgcaacatattttccctcactctaatgactatgtcatcgttttctaagaaaatatgtaaacctgaaggatatactcatgtttatccaaatcacccataaaacatgaggtaaatgaaaaggtccagtgaatagtgatggaaacaaaataaaattgcatgtcacgaactacttttggataatgaattacacatggtgagtacatcattagagatggaccaatttgagttcgttgttggtgtcacaatacttacaggatggaagttctgcctattataaacgagcctactgctgcatcgccagtatatggttttgataaaaagaacaatgaaacaattctggttaagactcaagagaattcagtgtatggtgaagcttagagcaaggtaggataaaacacaaggaagaggagaggaaaatacatagttgatttgtatgagaagcacatgatatttaagataacagagaagaaatatatagccgacttccccataacaatttaatcttttgcgaaaatggcaggtcataaatgtggaataaatattccctagattaaccgatgctctaccaatctgaagtaccactatctacgcagtgaggaccgagaagcatttgttgctgccaaatttgaaggatgaaaaagcagcacataacgagtggaattataaaggcatatatcacacaaagtggaggataaaggactaatccatcaatgcatcagaacatgcagttagcatctccattactttccttgcacatgcctaaaacagttgagttgtcctaacaaactgtagtgaaatggtctatcaagtatcaagcaatagcaaaaatgtacaagagaatgagcagatactgcctacattccataatgataaaaacattctgaatagggaaaagtcatacatcccagaacaaaaggaagatagaaaagatgttccccagtgacatcgcatagtagcaaatttcatgctggaaatgagagaaaaatataagcaaaccaattcctttattgcaagcgaatgaaaatagatcatccaccaacgccacatgcagatcaacctctgcctcttcaatttctagatatgcacagttttcacagggttagcgaatcacatcaaggctgacccaattacaatataccgag

SEQ ID NO: 461 - DNA, 544 bp, Zea mays
acgattttttctggctagctgtgtctactgggcgcggcttaaatagggagacgagaggaggttacgtgaggaatccatacgatttttgaacgattttttattcgtacgttgtcaagttctttttagataactccattacaacaacatatctgatctctttcttaaggattagttagatctgatcgtttgaacagcagatttaatctaaaacatatctgttgtagagtggaatagtagatcgtttaagcattagttagatctaatcgtttcctcgtgtgtatgtacacatgctgccgtccgtatacttttttccctcgtgatgacatatacatccggtgcaggaacgcggcgcatccgaatccaatcacatatattggtggtacgacaggtatctgtaattttacacttcggaggtatagagttaaaattccgaatattcttaaatctaaaaatgaaaaaagaaaaaacctcaaggttttgatcccctatctctctagcggcagtataaatggtagtggtagtgtaaagtattcttttatactgt

SEQ ID NO: 462 - DNA, 809 bp, Zea mays
agtttagtcctcatctatgtagttaatttctaattaatactcgtgattgacatcaacattggctaaactttagataggggaaccctattgtaggaaaaatattgtgcagcccgaatgcaaattagaatatgtatggttttagatttgaaggttccatcatcaaaaaattcagaatacacattcagaaccacatttctcttttattagaaactcctccaatatctttcaatctatccttaaccgaacgagcacccagtgagaaatggatgttatggaaagcttttccagtccaataatgttttattcgctatttgtagtcagaagttgacactgaaagagactggagtatcctcttctatctgtaagcatgggaaggcgaacatgttcaccattgtcaaccgtggaaacaaacctctgggttttagagaggtgaagacaacaccgctctcacaaggtggcaaggccaagctaattcgcctccgtccaccccatggctcgggcaatcttggagcgaatccggcgaactcgtgcccgctcacgccgctgggattcctggagcgtgcggccaccgtcttcagcgactgcccctccgtcgtctatcacgacacggtcttcacctggttccagacacatcggcgatgcctccgcctcgcctcggcgctcgtctccctcggcatcacccgtggcgacgttgtaagcctcgattaattccgcaaattgctcaccgtacccctctcatccctgccggcgcgggaaaatcaataagtctgatttggttaaatcaaatttcttggcatttttaggtgtcc

SEQ ID NO: 463 - DNA, 861 bp, Zea mays
ctcgacgacaacgcggcgaccaaggcggcgatacgcgaggacgggtggttctacacgggggacgtcggcgtgatgcatccggatggttaccttgagatccgcgaccgttccaaggacgtgatcatcaacgccggcgagaacatcagcagcgtggaggtcgagtcggtgctttacagtcatccggcggtgaacgaggcagccgtggtggcgcggccagatgagttacgaggcgagacgccgtgcgcgttcgtcagcgtcaaggactacgcggcgggcacggtgaccgcggccgacatcactgcatggtgccgggagcgcatgccgcagtacatggtgcccagaacggttgtcttccacaccgagcttcccaagacctccaccggcaagatccagaagtacgtgcttcggaacctcgccatggagatgggacccgcccgcaaggccgacggggcgacggccaacggtagcaggaggcagcagcaataagatgtagtggtttgttggggatttaaccacgcacaaatgcattccttgtcgtttccgagttgattaataacctttttttttgtctacttgatagtatatgtttccaagacgatgtttataaggaaaaacaaaataagtgaacatatcagttcattttaggacctaaagtaaagtcaaaagcgaataaaaaatgattcactttacaagatgtgaggtgaagtcaaaagtgagtggagcactggacgcgaaacctcactgacaaagatcatgtgccgagaagaaccttagaacatgtatctacaataaaataactgaatcacccttatataaataaataattgtatgtaaataaaatccctgtcgtttcgaagttaa

SEQ ID NO: 464 - DNA, 1535 bp, Zea mays
tgcggatgccatcacggcatcgctactactggcctcttcattcaactgttgctttccgtatagggactcaagcttaggacatcctatcacatccatcctcttgagaacaggggaggaattgaatacctctgctagacattgacacccctcaatcagcagagactctagatggggcaaaagctggctccttcctgaagttgcctggtcaggaccattcgccgttgcgtatccaattaggttattgcacccggcaatccgtagcctccgcaaagaaatcaaactttggaatgctttctccggccagtagacaagatcatcacatccggtaatttccagatcttgcagctgcccaaagcaaacccaccacagtgctagtgcacgtggttggaagaacaaaatgcagctccatagttgcatacttaccacagacggaggctggtcccatctctccttaccatcctccagcttgacaccctccaaaaacaaagtggacaatgaagtcacacatttgatccctccaagagagatttgttcatttgattcacgcaagaccagttctttgagcttcggtgcccaaggtagagttgttaactttgggcatttcctgataacaacaacctcaaccacaggaaatagtgcatgtccttcaatttcaggggcagcctcccatctctcaaagatacacaaatcttccaatatgagcctcttcagttctggaaatgctgagcgggccactgtataatctccactgcaatatgcttctcccagcaccgatgcatctggtagagctactagatttccacaacccttaatgttcaatttctcaagccgaggaaatgctactgcacctccatccactgcctcacaaattccttcaaaaacgtcaagaccaactagcttaagatccttaagctttccaaatgtagacgatgtacagctgctacacaagaaccgcaaatttcccaatcttttcaaatgaaggagttgcagttctgctagctgacacagtggtggaagctgctctgctttcctacaattggacaaccgaagctcgaccatgtttttcaacatacccaaccaagacggaaaactggtgcctttgtagtaatatatttctagggccagcaatccatcatgagtttcaaggctctctagcacctcatgacactgttgttcctcctccttaccacttgtccattctagtgacagctgtctcaattccttcttattctcaaggctggctgcttttgcatttcttctccctggcacattttcgagcttctttagtattaacgaacctccaatatttaaatcctttagctctgcaagactactacaactcaagccacttcccactacgaaccatgtaattgttcgaagcgaggtgatttgtccaagctctggaggcatgcactccaacctcgtgcacccatctgtgtacagatgacgaagggcactcatgtgcttcattctcttaggaagtctaataagattgaaacatccagaaagtttaagtgtctgaagattataaagga

SEQ ID NO: 465 - DNA, 2806 bp, Zea mays
gtggtatctaggcaacacccaggatcagcaagcatccagcctgctgccctctctctatccttctctctcttggatacctacggtatcgtggtgtcgttacccgacgacaacatcttagttcaatggtccatgtccagttcaaatatacatacagtaaaacaacctcgcatccaaataatgataattaaactaacgcagtctttaaatgtgccttgcatgctcatcttgcaaaatccttgagcatctatatagtaacggaaggggtgcaaatacggaacaagaaatttgtattgtaggcaacttacttgcattttatcttgattttcatccaatgccgcagacagagcctcagcagaagcaacacgaacattgtaatttttatgggaaagtgcattgaaaatatcagagtaatcggtgatgacatcaaaaccaaagcggtcccataactcctctgctaattcagcaaccacctagagaaggtacatgagccaaagaacaagaaaataaatataatttcttgctctagaaagaaaaaagttcaacatatttcactaacataaaaaaaagatcaatagttccaagttcaaagggatgttacaaaccttctcaggatcatgagcagcaatccaaaggctcgttgacacatgcaaatctcgttgcacagagtgcacaggaacacattttatagcagttaagcaggcaagcctaacgtgcacttcttttgcatatacaccaataaaagcctgaagaaagaaagaggtaagaatacatagcactagatgaaataaaatagaacaaaataagctgaagaacagaatacaaaataacaacctgcgctaactcatggcttcttagacctaggcatagctcattcagcataggcccaactgaaggatgataagcaggaacagtgcttagcacatgataaagaacctagccatagaaaaattaagatagtaaattctagaactaggagtctatgagaacaaaacaaggaacatcattaagtctgaaagaactaagaatgtttaactgataacatcctaggacgaggaagtggtagtattggatccatatgcaaagatagtacgtggagcacatcatcatgaagacacgtcttttttgaagatagaaggatcctttccatgatctgaaccaaatggtagcagcataaataaataaataaaaggacaaaaacaggttaaagtaaatgttggaagggaaatatcaaaaggaatagaaagtgaatttatggttggactaaagacagtggacaccataccggaaagacaaaagtaaacgaatctgctggaagaggacctgctttgcacgcaatagtcagaccatttactatttgttcaaagaggccagatgatggcttcttgctatcatcttccatgatcacaggggtaagatccaaaacgatttcaagatcaccaacagatatcacacgaattgcagcagcaatctcgggtgcccaattgcaaagaggaggggctgtgcaacgagctagcctcaacaatgtacaaaatgcagcatcgcttactattgcagaacttagcaaaggttcaacataatttacctgcatagcacaacatcaaattctgagccacaacagatatgataaatataaatgtagaaaatgcatcactactaatagcagtgtctcatgccaaaaaatgataacaagaggatataagaacctaaaaggtttctccaagatatgttccatttcactgataaccaaatacaaatttcactattttttgactggatatatgagggtcaattattacatacttgattatcatgatttggctgttcgtaaaagatactggtgcggaaacaaaataacatattggtgcatttattaagacataaatcataaacatttccaaaaacaaaaaaatgtaaacctcgctgcagacacaaaagaaaaggtcattttttgttcaaattaattcttatcgattattcgatttttttgggtagctttctaggtttaaaaaacgatcttaattaaacaagatatagccaatgtgttcaatatttactcctagatgtgcacattactccctctatctaacacccttcaatgttgtgatgaagttctgccaagcatggtctatgggctggcaacatagtaacagctaacagtaaaaactgaaagaaactacagagggaaggaaaagattgctaaccagagatggcagttgaccatgagtaaatataggattagcaatagccaattcgccaagagcatccaacattaaggagagattcttctgcacttgcccaaccttcatacgtacagatgcttcctccttcaagagcaactctctggcctcctctttagcagtcttagccttgtctataggagctggaaatattagaaaataaattttcaccaagcaacacactatgcacctattgtcagggctaagaggtcgaagtaccagtcttctttgtagatttcccagcttctcgcttgccagtgcctgaagattctctcttctcattctttgcaggaacaacagaccgagctgtctcctacaaattatagcaacaacaaaatttggcatatacaatagattaaagccatattcactggctatcaaataataatactagattgcacatttggtagattttctttctggcaaagacttagaagctacaagttcatcacaaactacaatcaaaatatttaaaaaaaacaacttgcaagaacaaaatattactgcatcttgatcatcatatgcacggaaacgcccctttgcaagtttagagtttttggaagcaacag

SEQ ID NO: 466 - DNA, 805 bp, Zea mays
ctagaaaccacgacaggaacattggtatagtatataatgaagtgcatctataattttttaagaagttttaacaacctttagtagtttgattgcacatctcgaagagcttgattgcacaacagtttgatccatatcagggctatcaccttgcaatttcatccgcagttacctggtattataggtgaaaatcagtaagactgcaaagatatgatgaaattattaattgatcctttgcatcaaagtaaatgacaatttagtaagaatcgaagtgttaatttttacatgagagggatacgtgaaggcaaagggatgtaatcaaagcttgtgaacatgtgccttgctaatgcaaatcaatgtgtccatgaaggatgcatattatatatcttgcatgctaataattctgctaatgcagatctacgacatgaaacaattgtctgcgacgacatgaaacatttgtctgatgagcaatgtatgtaggagtttttttgtatgcaagccttcctaaaagtcgaaaactacaaaacatataaattttccacattgtcattttgccaaacacatcgcagcctagcggcgtgcgcctggggcctagttacctgaccagaacgcttcaattcagcattccagccaacaactaatcgagatgcattggtgcgtgagaatagcagatgacttgcagtggaggacgaagagtaggttgttgttcagttgttgggcatgtactcgtagaccaacagcttctcatcgtggaggacaaaggactttttggtgcttagtgatggtttcatgtcatggaacgtgagag

SEQ ID NO: 467 - DNA, 3920 bp, Zea mays
aaataatacaattatgaactgggcacagaacagtgtaagcaaaattctactgaagcacacagatgacagatctacataagttattgcaaaatagaacagagtactaatcaggcagcaactttgaaggcaaaggaactaacagtaagcattgaaacttctagattatcctaagcttatgtcaaaaaaatgtgatcctaccaaaatactgccccaatttggaacaaataatgtctataaagcatacgcataccttaaatagaatatacagcataatatcaacaaacaaaaaagcaagtttcaaagaaatgatcatggctgtcaattagcactcgggttaattaaactgttgagcatatatcttcttcaatatttggtaagctgatccaaacttatttccatcaacaagtttttgcagcatgttgtgaatgattgtccaaaccacaggatgtcagaaaagcaacaaaaatcagtccaaattaattccagttatagcttaaatttgcacctcttattcgtagattctttgaagcgcccgagcatttgtatcatggaatcaacgcttatttgtccagagaacatgtgttgaaaatatgcattagcctctacttcaatgtcatctgaccctccctctgaattagtaagttctctcacaacagagctaggtttcctcgattcatacagagcacacaatttctttatttcatccagtattacatctgacaagagctgccccgagtgagattgaagaacctgaaaatgtgcatgacatgaatccatacttgtccccccccccaaaaaaaaatccaaaacagcaaaactgaaaaaaataataaccatgaccatacagacctttatgaagacacaacaagactcccaatataagtttttgacaatagattgaggttgtgacatgccctctaagacattatcagtgttgctcatagttgctttcaggaaatcaacacattcctgagtgtaggcgagttgagttaggaaagacaaaccttataatcaagcattgaaataaacgggtagtttgctaccagaattgaacaacatgatggatgtgggaagaggtcagctgaaatgtagcagcttacaagaatagattatgcatattacctcaacgaaaccttttccatataaagataacttttcagtcagccatttctcaagatgactatagtctttcctcaaggcagcagcagccaattttatagaaaatgcaaatggagtagaatcaaggacagaagacagaatctgtttaaagtagaaataaaagttgagtgaaacaaatttgtgagaaaatagtgttacagcattgaagtaatattgtagcatggtcccaataacaaacagatgaaaaaaaaagttactttcatgtggataagttttgatacgatacaatttcagaaaataaagtgcattcctcttatacaaaccttcaagtcatgacaaacatcaacagttcttagcaaacaatctggatcactatgagcatcaacaaaacctcgaagggtgaagtatgggtttgtatgccagagataattcataacattgtgctttgttggatccttcagtagagcaggaaatatgcaggacagtacttcatactgaaggagattatacacggtctgcaaagagacaaggggaatttatagcactgctaaaaacaaataaaaatagatgcgactcattatgtgggaccagaaatgcatacgtcgatgcagctaacaccaaaaagaaagagataaggggaacttaacactattaaagtcatgaaactagaggcaaacccattaggtgggaatagaaatacatacagtgacatggctaacaccaacaagtaagagttcagggcaatgtcccagtggatactcaagcattgatcgtacagatgtagcgtacccaacttcagctagttggcataaaacttctaaaaggtcaaggcaggaccaagcatgattgccttgactaggacctgccaaatcctgaaattcctacagtatatgacaactgttaggtgtgaattggatagaattttatcaagatgccagatgttgtcagaattaccaagtgcctggacgaatgagcaaatgtaaatttatcaggtgaagcagaaactgcatgcttcaagaacgatatctggccttctctgtttttccacaatgacccacaaacagcatgaagtggaaatggatcctgtataatccaattaatttattaagcagctagttgattttccaagaatagaaatgtttatatatacataccttgcaagcacgcgtgtatatagacatcaataggtaaaagcctgtttcatcaggtatattgaaaccctcgtgatcaagatattccattacacgcacccagtttgtacttggggcctgcgtgttaaagagagatagagcgtaagggtgcaagataaaaaaaagaacatccaataaaaaagcaagaagtcaatagcttacgagttcattgattgaatccacaagaacatctgcgttccatttagtcagctgagatgagtcgttcgtgtggctattaagaatagcagatacaaatgttgcatatctgttatgggcatctccaagaccactatgagtgccaacaacagccccaagcaacttagatatggcgacatcatcaagaggctcaacaatggaaagtatttccttacagcgagtgttgtcaacagtacatccataacccaactcagctacaatgtcagccatgcttatttctttcccgatttcagacagaagtgactcaaaatcatcatttgtgctacccaagtacatatccaaatgtctacatggcacaaaaaaagagggggagcatttgtgaataaataggaatgaagaagtacacatattcagaatttgattagtcagaaactgaataccttgaaagatttggttgtctatcaaaatctccattagtgacaggtgcaaaaaacggcctctctgtgacttttagtagagatacaacattatttaaagtgtccagatgcttcaacaggccatcatactgatgcagaaacacgacaatttcatgaatttgatcatttgatacagattggataggattcatgcacagctcttcaatttgagcaattgaaaaccattgccctggaacaagaggcaatgtcaatgatcatctgaaaataagagaagcggatatgatatcactagactcacagagaaatgtctacctttctgctttatctctgagttctcagaatctgagagcgcaagcccaacaccaattttctcggcaactgagagttccagcagatttgacagactttcaagaaaatcatccgtcaaggctattgttgtcagcacctcacaaaaactggttgtgaagcatgtcttgcgcaaacaatatctgaaaacatcagataaaagcctttgttgcaactgcaactggaggttcttgacctccccagcattcagcaacacttgattcagacatactcggagcaccaaaatgcatccatccaggccactgtcaactaactgaaaaggtggggaaaataattggaattagaaaacatcgagcagactcagtattcagtaattagaactaagatatgatcgaagccaaagaagaaactcattttatcaagcaagtaggtaaactgctctattttgcgaaactacagtaggtggttcaacgagaatttgaactaaaactgccaatgaaaaagtcaccacgagctctgtgattgaggaaatgaaatagatcagctagtgaagcgaatgagccttaactattcatacagagtttaagcgcggccataagtcccaaaaacccacttgtgttaacctaggtcgctagcgctgaacttgtggcctgcaactctaacaaatctaaactcagaatcgacaatcgtaccgttaaacgctaccatatcc

SEQ ID NO: 468 - DNA, 543 bp, Zea mays
gtgtgattacatttgcggcctaactgtggccagtccagttacgctggagtcactagtatttaggtgacactatagaagcggccgcgacaacttgtccacgaccacatggttgcaaacaattaataaaagtagattcccgtacttcacaggaaggaaagtctaaaacaattctgttgtgggatctttctaaaatatgcttcttgtatatgctatctgcatcatttatgtcaagatgctaaaaaagttgaaacagaggttaggtaaatttgcaatagaggttaaaaaattaacaattattctagttttacctcttacaagaagacttctcatgcagcactgcaaattgtctgaagcagctatcttcccagctaatcaactaaaaaggacatcaagggggtgcagtcagtttctttggactacacttccgcatcacctcatagaacaataatagaatagtacttacatcaacatcctccagcaacatcactttcttctgtgcctctgctgccctttccttttcctccgcagccagctgaaagggac

SEQ ID NO: 469 - DNA, 1274 bp, Zea mays
ttgcaacaatcagatgcagtcaaaatgtcttaaaggttccttttcgtaccctttttgtcctcttactgattttcttaattggttttgcactcaaaaggttatcgaccattgcctccgtatacaggttaattctgcaacattgtgtccaagctgttcctttgaatacagtccatgaaaacaacctgtgaaccaacgattcttcacttagtcactttcctacccaacatgagaaaaacaattactttaaggaattatggatatgctctgcattatcctggtacttactagaaacataaggacacatccattcatatgccccggattcttcttaaagtcagtgcaagagctttctttaatgaatgaaatatcacatatgaccagtcaacctttttcaacttttctaggtcatatacagcttgaagttcaggtgaggttacataaaaatagacttttgtggcagtagcaggttatttaagaccacactgaaaaaatgtctgacgagcatatctgtgtccatgtgcatggagatctcctcgttatccgaatgttgagccaactttacaatgttagtcacggtgaaataggttctcttaacactagcaggtacttcatcgttccgttgaccagcaccaccttcattggtctgttgtccagcaggtacttcattggtctgttgaccagcaccaccttcattggtctgttgactagcaccacctttatttttctgtctcagaggaaacttttcagatactattttcagcacttcgtacattttgacatattgttcatctgctgaagcttttgaagatggacttgggagaaccttctcagagcaggccaagaacttgttggattttcagttgtgggctgcaccgggtttgcagctccttgtcatgctcggcatatttggaaacagagtgcctgcagatgttgctaaaaagaaaattaatcaaaatttcagaaatctacagcttctttgatatgattttgatatttagctttaactgttttatcacaaagaagactatcaactaatgtaattgaaacaaccgcaaaagttgtctaagtggccttgtcggactttgctgcggctgaggcagcctgttcgctgagacgaccagtcctcctgagacttgaaaacggagccggcttccttacgctgggcgcgtatgacgcgacccatctggtcaacggcggcggcggcgggagaggacgcgaagggaagaaaccagagaataactgagtgcgtccacaggaataactaaggtattaga

SEQ ID NO: 470 - DNA, 610 bp, Zea mays
ataacggagtgggcatattataataactgaggtattataatggaggcaacatgaataaagcggaggaagcatggatgaaacatgcaccaggaggcaacatatacaaaaaaagggcaaacattatacaggaggaattgaggaaacatgtagggaactccgaggaaacatctaccagaggaggcaacatgtacataactggaggaaccgaaaaacatatacctggaggcaacatgtataaataaggggaaaatatgtaggaaataggagtgtgctagttatgtaggaaataggagttgaacaaagagcaatacgcagaacaaaacgaacagcatgcatgccgaccgcatccagcagatgctcaaactcgggcgcatatcaacatacagaagcattccaaaaggcaacaagctcaagtaggaaatatgaaaaaagtctgatcatgataaatgttgcggagtgtaactcagaattcctgacgtagtcaaacaagtacagctttatctagatacaataggtgtgagtaggggtaatggttggggatatgaggcctgagtggcaattcacagcaggtgtgttctctagagatgagctcatgcctggctttggaact

SEQ ID NO: 471 - DNA, 747 bp, Zea mays
agtttatgtttgttgatgcatgtgagtgttatgaagatgcacatggatcatagcacgaattggtgatgctgaccccttgcggcgtgctcaaagttgaaatgtttgatggtattttgcatgttatttttcactttctttataacttttcagttggtaaatttgatatacatatgcaaataaccgatgttagatatatatagatacaatatagcttgtttctttatatagggtactaggtatttgcacgatgtagctgttgttgacacctaattgcactatttacttgccaaatcaagcttagtgcctcattggttacaattatgcacttgtagccatttgtcagccaccctacaaatatacaaataggtcagatttgatgtattttctatttctaataagcttctatgatgtatgaccttgcaataagaattttagtgccatgatgataggatcagcaagacagtttctaagccaatctgaaacacttgacagtttcacagggatgtgtcaaccatgcccacatttcttgtttatttgttttggaaccaaacttaaatctgaacatttttgttgtgagcaataagaatttcagtgccaagattttgtagacaaaattataaaaatttgttgcttgaataaactaaagaattgaaggaggaaattgttgtttgtgtctgtgttgcaggtgatggggagtcaaaaaggaaggaggagtacatgtgcttcctagagcaccactgcacctga

SEQ ID NO: 472 - DNA, 507 bp, Zea mays
cttactgtagctactgcatcatgaataagaaaattctatctatgcaaaccttgggaagatcaagactaaatggagtatcatttgtcaacttttagctcattgctactgaaacaggagctgaatttgggctattaattttgtgtttgtatttgtaatctattttgcagtcttgattatgtctatttcatattctaatctggaggatgttggaggtccttaggtttgtgaatgaaccttatatattttataaacctttttatcaagcttatttcgataataaatgaagcacacatctttgatgatgaatttgcaccggcctctgatggttccttgtgataatgtgaagctttgctcattttctagagttagggtgtgagttttcgcattattaaaataaagataacattttcgtctagctgaaatagttttgtatttcatatgtactttaattaaatatatttctactgaaactacgcagtgaagttgtttgacgatagacttaattga

SEQ ID NO: 473 - DNA, 1251 bp, Zea mays
aattgtctgcattctatagtagcacattctgcagcacatgcacatagggtgctggacagggtaaattcactcatctgtgtcccttcttggtgcatctttgaaaaaagcttcagagcctgtaaaccatctccattgcaggtatacccagcaatcatggtattccatgagactatgcttctgaaagacattgagtcaaaaacatggcgagcgcaatcattcctaccacattttgtatacaagttgatgagaatattgcatgtgacagtatcagttaccaaacccaaatggatggctaaaccatggcagcctttcccaaccaagagggacctcttctgtgtacactgttgcaaaagttcatgtagcgtaaacatgtcaatcaaattcctgtcaaacctaataaggcttctatcctttagggcaattccattgtttagcttgttacaaaaagaacgagcaccaaaatgaattccggagagtacagcaataagagaacaggcacactgttttatagattgatggttaaaccaaatgcccatccaagcaaggcagctgccccaaactctctcagttttacttttaggcaaacttcacaaagtgggatttgtacttacaaaaaggaagtggaatttgcttgacgctaagagcagaaaaaattctctgcagactgaactgtgaatgtttcagcatgtttgtccaccttcagaaaatcagaaacttttgcattgcatcgctgaaagaaatagcaagttaatacaagtagcaaccttgtgatactcattcacatatcttctgctatcaaatttacatcccgtcataaaaggaatgcaagtttaaaataaatcaaaatgagaaaatacaccggatttcactaaaatctgtacaaatggttgaaaatgaaaaaaaacatttgaaaaaataaatcaggagctaaactaatggagctgcaggtttaacacctttgcgagctgaatttagcatagcacttatattgtgacactgaacactagtactccagtcataatagcctcatttttcatgtccattttcagtcttgcagaatttgtttactgaatagaattgttagataaccataaaatcagaggggctagggcacgaccatttggaatgacagaacaacagtaccgaaggattaaacaattcagtgctttgctaacagtaatattcttattttccagatgagctcaccctgaatcaggatggcgttaaacagcgttccacaaaacacaagtt

SEQ ID NO: 474 - DNA, 763 bp, Zea mays; identical to SEQ ID NO: 423

SEQ ID NO: 475 - DNA, 1244 bp, Zea mays
tttagtagtaaactagtaacagatccatatttccccaaaaacaatctccaatttgattaaatatatacagaaactattaatatatatgatcttcagaaaaaataatacattagtcgtcaaatgttttttatgacaaacatagtggaagatattatcttatgcaatcctatgaagatttagaatgttttgactccttgggaaacgagacttccattctttcctggatggagaaaatatttgggtgtgggttatcagatcacctaaaattttagatccagtaatttagtttttttcaaaaaaataggtccttaaattgatagctacagtttgtcttaaaaataaacaatgaaaaaaatacagtatatatatttcaaaactaccgagttctaccaatattcaattgaaaataaacataaatgccaggtgccataaagtacaagtatacattatatatattaacggttaatatatacatttagagtttattggtggtgagaaattgtttcattaacaaaccaaactctaccataatattttctgtaagttattactttgtatacaccttggcataccaaaattggaacccaactgtgagaactccattttttataaaacagtgccgttatacatatgattcttggatagaagataattcaacattttaagtgttgcggtgtagattgaaactattgtcatgtcactgtaatatcaatgaatataatgtatggtacggtctagaatctattttaacaaaatatagttgacatttttaatagaatatataataagaagcaaagtctaaatttaatgtgtggatgaaaaatatgacattcacttagaattagaaattgagattcactaaatatagatttgtaatgtctcaaaaagatgtagcaagggttgatataactccggataaggttttagcaaagtacatattaaaaatcactgaatgtatgacgaaatcatataaagtatataaaaattgttgtgttagatagaacaatcaattttgagtagctatgaggtataaatttatccacatagtgttcagatggtgcaatgcatgtaatagtgtaagcacatgattgctacccacttcactataaattgttgacccatcaatggtggtttttaatttagaaatataaaaatgacgtaaggttctaaaaaatcaacggtgaggactcaggccacgaatatccccagcggagtcgccaaatagtgttgtggtgccgatctgg

SEQ ID NO: 476 - DNA, 703 bp, Zea mays
ttgaacgtggaggcgctccgagatcctagccacggccggggcataagtaaagtaccgacacatgcatcctcgcccctgttgagccagccatcccttcctgtgaccgagaaagaagtctgccgtccaccgccggtgccccatgcctgcctacaccgttcattggtggccaaggttgggtggtgggcgttcggcagcgtgcgtggttcgtgtgtgtgaagtatcaagctcgcggatcagcccgagcacctctcgcccccgccgtacctccgctccacatcgtggaccgaccccgacgtgtgacacgtctctttcgcgcttgtgagtccttgacgcgtagagcgagtcatccatagggttcggcttcggcctgatcggcgtcatgcacgtcgctcatcggcgagctctgccacgcggactgctcgcgcttccgtgttcgatacgagaggtaggtgatggaaccagcgccgtaggaaaagtgatgaacgactgagatcatgcggcgcgtagcatttcgtcgtattaaaatgtgaccgctggatgccaatccgatggcctcggttggatcggggcagggatgtctcggggccatcggaattttaatccaaaacaatggctgcacccgcgtaacgattcatgacccacgtccatctaatctgggccgtagaaactaatcggacggctgttgttatgtagtatgttttca

SEQ ID NO: 477 - DNA, 1564 bp, Zea mays
tgctagcgcgacacactaggtgcatgttcgttagatgcatatagctatagtgtacagtgtactagtgcttgtattatatatgtgtatttttttttaatctcacagattcatgattgaccgttgattattctacatagggttcaaaagtcaaaaaatttgtcctaaactcttaccttacatcagcaccaagtgattaaaaagctacaataagaggatgttgagtgttgccattcattttcttttggcactggtagttctgtcgactaggattactaaatgacaggtaggtcgacaacatcaatgtagtcaatactctggtttgtaccattctcacaaaaaaaaggcatcggtgcctcacaataaaaccccaatagcactgctagcactagcagaggccactcctttgtgcaatatttgtctaaaccacatgttttgtatccattatcaacttagattaggaagcatcgtgaagtatcgctgcttctgcatgcagtttgtagcggcggggtcaccgacttgattagctggacgactaacataatcaactatttatgctattattgttatttagcaggtcgtaaacattgtagcacaatgtcgttatgctgcacacgaaaagagtggatggaataatgtaactttcgaaattcatggacaaatacgttgaaaatcacacttctcattttagaacctatctgtagtgtaatagctcgttaagagaaaacgtaccacacaggaaattggtgttttaaagtactaaaggtataagtttgtttttcattatagaatataagtttgtttttctccatacatctctatcccagattattcatgtttggtattgagatatgtatggggaaaatataaatttatgggtgaaattaaaattgcagtaggagtgtactagtgtagggccctggcactgacgacataaggtcaggcgccataaccacatttcttcagcaaaatgaatgtatcactcctccagtcaagggtctgtctgtctgtctttgagcaccttctcgaggtgtataaatacaatggaaagggtgaactcattctactatacttctgctgctctacaccaccaatgtgctgctggctttctgctgacacctttaatcaccaccaataatgtgctgttggctccttttgcactgtaccttttcatcagtttgggcatgagaagtgttgagacatgtagagcttaacatgacaaatatgatgctgtcaaggtagatcctaactctacttaggtctggagtagtgccaatggtgaccggaatagtactaccggaagtactctaacgctatttatagctaatgttatacgctcattattactatagggtacactagagaagactaattaatgtctagtctgccatgcaagaagtacaaattcgtgcttataaaactgaaacgatggatcacatctcgccggcatttggcaaacagaaacaaaacctgatgaaacatatgtaaactacaacaaaaagagtgaaagatctagatgcaaacatttgtgctatagaagcaagaacgtgaatatgttttatgaatt

SEQ ID NO: 478 - DNA, 559 bp, Zea mays
caaattatgcatccaaaacttacaatttcgaatggaaggagtagcagttaagcaattctacgtagtaatagtagttagtttaagcaacagcagcgctttaaatacagatactaattgctaacctgaagacgtgaatttgtaacatcaacatgatcttcaaggtcatcctgcaaccaaagataaagaagttatcatcgagtgcagaagacacaaatactactggttttgttaggtggcactaactatcaatcttgtgtgcagggtaagttcttcattgactgctaatgcaatatgcttcgtgctcagcactgtctcttccagcttctcgagaccctcatcttgctctgtaacatgttgatacacgactcaaataaataaagcactatgaaatggtccttgctcccacaactgtcatttccaaggaactagatatgtaccaaccaaatatatgaaatgcaaatggtgtgaaaaaacagtgctacatgacctcatgcaaacagttgaatgcacccttttagtaaggtccatggagcaaacactactgaacaaaccacaataa

SEQ ID NO: 479 - DNA, 1561 bp, Zea mays
ggcattttactttgaccaagcagatcctccctaaattggaaaaacaagggtaaatattcacacattagttctaacaaaaaaacataataatacttacctaaaaacttgaatacagtaaattaatgtgtttaaaaaatatattaagatttaggaaggatgagttcctatagagatcattgctgacacgacagacctgttagcgaagtttgacatgttgaaacttgtcgccatctgcttggctttagacttcaaactggaaagcatgtcttggcgtttatgcatctccttgtcagtgctgcacaagtcaaaagaagtcaatttcaagcaaaaatgtttgatggtacgcaaaaaaaaaacagagtaaatgtctggacatcaaagtatgaaattctttgtcaaggaataatatctttcattgctacacaaatccttctcataatgaattttctctcaacttaaacgtacaaaacatgtatctagtgaaatgatgtccacaccgtcctagtaatctgcagaacaaagggaaccaatgaaccatattttcgtttgtaagcaggaaaccatttactagtacaaccagcaaattactcttttcaagtaatatattatgggctgttaggatcagtgccccagcaggaagccaggaacacaagttttggccctgcccatgcaatttggctgggctgcaatgctgatgcatcagctggagagtggcccaagaagtgccacacattttgtaacaatctttggaattgtattttctaaactatgtgcccaatatgtgatccatttacaccaattacgtacttgtgatttaatgtaaacaaagacacatgatggataattcgatttatgtcgaaattctaaaaatcactgacatgtgggccccacatgagaatcactgttttagaataatttgctgtggttgcaaccaagtccaatcttggctttgttacaaaccgaacgctgtatttataactcaaatttggtattatcctaactttggccatggccaatatttgggttaggcctcctaggatttagggtctacaagaaaacaaaccactggacgatctattctggaacaacgtaaaattgtgcacaacacataaaccagataactcaatttttagtacagtgcctgtcatagccagatccataacatttcatcacctaaggtacggagtttatctttattgattcacttattcatggcatagttcagtgctcactcattcgaataccacttttcatccctagatctagtatcagccattgttaagaccataaccattcatttacagccgcatgcagctcaattttgagtgcaagaacacgtcaaatatagtattgacaaaacagatcattggtttaaataagttcttcagattcaatagctatatgtttcattgctaagtatcagacttgagaaaaacaaataaggcatcattgcaagcactccacccatcattagtatcaaagttgtgaaagtagttgcaacacgacatacattgactttggaggaattctgccaaacaatgactccaagctatccagtcta

SEQ ID NO: 480 - DNA, 511 bp, Zea mays
ggtgagccagtgtgattacatttgcggcctaactgtggccagtccagttacgctggagtcactagtatttaggtgacactatagaagcggccgcgacaacttgtccacgatccgagggtcttccagccgatcttgggctaacattcgaaaggttaaaggcaaatgacatcaagttaaaccccaaaaagtggggctgaaaagggaaggcgccagacagctagccaggcttctcaaaaaactttttacgtccattacgttcttcgcatccttctaacgtgtgtggctacactaatatctttcccgttttgtctcctagattaacataggtcctcgaaagagctgaaggaaacaaaaacaaacctgggcacccttcagaatgcccctgctcgaggaaccaaacaaacattgatcaaacactgaggtcttccatcctggtaagatctcaaacatgttcaattccttacacagggaccaaaaaactcacaataggattgtcatgaactctagagtt

SEQ ID NO: 481 - DNA, 536 bp, Zea mays
catctaaaaatatataatcgagatgtgatcttatgtgaaaactcacacaagtagacgcagcatgcatgaccataacgattaaataatatataactatcgatgcttgaaccaaatcagttttataaaatcttggtcttacaaatgcatctatatatacacgagaccccacatatctcaaactacataaaaatattgtaatagaccaaacgacctaatctacgagaaagtatatcgtaataacaaaaccttaatattgctatcgtaataacaaaaactaaatcttgctaaaactattcattgtcctaaatcttactatcgtaataaaaaaaacctaaatcttgcttaaacccttcattgtcctaaatcttgctatcgtacgtagtaacaaaacctaaatcttgctatcgtaataacaaaacctaataaataaatcttgcttaaactctccattgtggatccttatccattatggccccctgcagctggtcgccggtggacgaagtggtggggtggcgcgctttatccgtctccattgt

SEQ ID NO: 482 - DNA, 725 bp, Zea mays
agtttgcagatgtactcccgcgcgggtgccggcgagtcgacgacgacgaccgccccagacgaggcgccgcggtggtcgctgatcgtgtcgtcagactcggacgaaggcgtgggcgacggaagcggcgcgccgacctggcccatggcgaccaataccatcttcctgccggtgaacgtgctgcggatgtgcgtactcgccccctgcgcctcgctcgcagaacgtcgaggcggtgtgctctgctggggcttgcggttgtgggcgtaggtttaaataggtgagggatgagagttgttgcgtgcgcgaaattacgcgggaactggactccgatccccgcagcggcagcaacagactcgagtccgttcgctggactaccaggcgagataatatctggttacttctttcaatagacgcacgcagcaacagactccatattactgcctacctttctagacggatcagcttgaacgtgatatggatccgatctggctacgcctacgatacagacgctgctaataaattttattttctcctaataaattttatggcaaaaataacattttacttcgatgcaacaaaatcaatcgattttctgagatatctatatggctcgtagtccccttatctggcagttaaaactatttttccgtagtttcttcgtcttgtcaatgctaggctatcataacatatttcaaatcggactttgatcgatttcttcaaactctttc

SEQ ID NO: 483 - DNA, 3405 bp, Zea mays
ttagactattatgtgacgggcctaaaacccagcacaagaggccaattagggttagactacgtaacataagttcactgcagtgctatatgcatctctctctcctttcattttgtcatttgaaacaaagaaccttgagtttttttcagccatactaccagagctcatgagaacaattttctttgcttgaagaataggccgtaacaaaattttaaactgaatgtgatagatttaaacttccaagaaagtttgaggtcagtgaaattgatgaaggtgatttttgtactaaccttcctcatcaaatataacttgattaataataatgttgtgcgaatcaatctcaaactttgctaactcttgcaccaatctctctgtttcatacaatgaaagaaattccgggatacaaacacatacaaaagttgtcaaatcctaggaagaaaataaaaatggaagttagaaggggataccataaacattaggtgcctaaagaatgtagatatgcaaagtaaagataacgaagattagaaattatcagataatccagcatgtttggtcagttcgtgtttacccagcggtgctcatgtacttaaattggacacgtgcagaggctatctgttgtgatgttaaaaactgctctgtaaagtaactatgcaaactgtaagttgagcatgtagtgtgagtcaagtctacaatctatacttttggttttaagcaagaaacacaatcaactcgaatcttaagaggactaatgcttttttagttccaagtttcactatcatgaatttcccatgtgtggtctcgctatatcctttaaccagtgacattttttaacgccgagtaccatagcatgatctgttactagtagattaaaacgcaattctgcttccatacaaggtagggagtcttactggatctttaaattgcctgttcacttgttcgatcacgtccttcataccctcaagtctcccaagcattgcatcctcgttcagctcatcgccaagaccaaacaatcgactggcctgccaaatgcattcattattatattagctatacatgtgagtttccatctgggtaggtccaatgtataatctgcacatgcaaaagttcaccatgtacatattaccatctgacctcatcacctcagtatgaacaaagatatgtcatcaagtcaatatttttctttgctttgctttttgtccaaggagaactcataatatgattgtatttgcaatactggaacatcagaactttctttgggataagcttggcgattcaggctctgttgagcatatcacaaaatatctctatcatttatttggttataatttagagaagatgcagcctagtaccctgaagtaattgcctaattgatatcaatagtgttttatttagagaagcaaataacatattagacacataccctagcaacttctccaaaaaatggttttccagtatattaaaatgtatataaaatacctgattcaacagaccaccaaatctatttttcaactccatcattttctcaagacccttctctaaagttgctgggaactgaagcaaccgcaatgtatgccctgtaggagcagtatcaaaaactacaacagagtaatccattgtttggactaatctgcagtgaggaaaatataatattcaaaaagttgctgaaagccaagaaatgcaaggaagtaccattttcaggataacaatggtaatcaaaatctaactctcttgacatattggagacattgaacaatgaacaagggaattagaaagggtagcgagtgaaatatgaaatagatggtaacaaaagtagctggccatattgggaagcatggcaaacaactgaacggagcaaaaccttactttagcatttcagcaaaactcatagcttcatctactcctggaatcgcatttgtcagttctgaaaggaatccctccattccttcattggctaaatcatcattttctaccttcgggtcaatttcctgcagataaagttacggaatgagattattcagccaaaataccagctgtaataacatgaaccgagccatttttcgaaaacaaataatcaaactaaggaaatagcagattactcttaaaaaatagaactcatagggcaacaaatgaaacatgttttgctatgtatatcatttgtgagaatacaaagaaatgactaaataggttcatatcagtaccatgcttgtcatggatgaaaatacaaagaaaaggaggcaaatgctgaatctcgtgcttagtcaatggtcatacatttttttaatatccaagtggaacatgttctaagtgaaattgcaatggaatgggtattctataaggcaaccacctaatatgttatcaacatcttcctagaataaagaaaaaaataccaataaagattgggtacttcttttgtacaggtctgctacctattcttaaacttccataatcgactcaagaaataatgcagaaatcacagacatatcattcacagagcataatcaccacttggtatggttcacgaagatgcaggccccatctctgagcaataatcctgtgaccaacatgccacaaagtacaaacacaaacccaaaccgaccccgaattgataactttgcatctcgtatagcctggccttaggtaagttcctatgacttccacacgtggaaaattatgggccacatgcgacttctctctctgcatactgcctgtctcctcagacaaccctgctaaccccctcacaaaaattcggtgaggctacaatccaatccaatcaccattcgccagaacacgcagcctgcccatccaatcctcacaagcaccacctcattgggtggggcaagtgaagacgacccggcgagaagtgtggattggagacgtaagaaagagaatataatggaggaattttgctttctgtgtgtgtgtgcgcgcgcgcgcgtttaccatggcgtagaggttggtgaatccgcggacgagggtgggaaacttggtgaaccgctgctggaaggcatcgctgaggttgtgcgcggggtcggtggagatgactagcacggactggcggacccccgcgaggaggacggaaaggatggagctgcaggtggtcttgcctacgccgcccttgccgccgacgaagacccacttgagggactcctggtctaggaggttccgcaccgtgggctccggcgcgtcgccggcgtccaccgccgccgcagacgccatgctccgatacccgcgcggtgatcggggtgggcgataggacttaggaggcaatgagatctggcggagtggaggctggagaggaagcgaacggcggtggtgcctcactggcggcagatgcggtactggaattgtctacgtggaaaatacctttcctcctttggacgttttcaactttagtacggttagtggtac

SEQ ID NO: 484 - DNA, 1993 bp, Zea mays
tagcccacgttaaaaaagctaaaatagcaaatttttcgacgacgatgggctcctcgagcccatggccacgactagcattgctactcgtgacagtcgcatatatgaggaagagactaccaaaatctagactctaggctaactttaacaaggtgacgacgttcgacggtaaatgtaaaaaggtaaggatctttgatatcagcaaaccatgcaagagtactgtcggagagaaaaaaatattaaattctctgagaaataagtgaaaagtaaatttgttgcagggaaagatacaatgtttgatgggctacagtaaaaatatgttgaacaatagaaaatacagtggcagtatgtctaaactacggaaaaagagtacatagttataaatgtttttttcatgaaactaaatactactttgtagtatagttataaatgtttttttcatgaaactaaatactactttgtagttgaagtacagaagagagaaaccatacctctataagttggtagccaaataattgtagccccgcagaaattgttgctattaaaacaatttttagaaatgtataagtgactttatgtagcagcacccatatcgagtagtagcaacagctcgaatgaaaataaactatatgtcagatgtatagaggacccatggtggactgccatctcgaaaccatacaaaaaattcttatgatgccaacagagaacaaatattgatagcaagagaaacgatggaagtcaatttaagataactataaacctttctccatgatcataaattgaatgttgtttaaaaatgatatttgagatctttgggaactcatctccatgttcctgtttatgctatctctgaatgaaatgttcttactcctaatgaaaataacattatagaactaaaatggccaaaagagcgatggaagtcatctttaagataattataaacctatctccatgatcataaattgaaagttgttataaaatgatacttgagatctttgggaactcatctccatgttcatgtttgtgctatctctgaatgaaatgttcttactcctaatgaaacaacgttctagaactaaaatggccaaaagaggtgtcgaagatcataagtgtataattatcagtataaacctatctccatgatcataaattgaatgttgtaaaaaaatgatacttaagatatttgggaactgatctccatggtcatgtttatgctatctctaaatgaattgttattactcctaacgaaaacaacattctagaattggaacggccaaaagagttgtcgaataccataagcctataattatcatgaacatttatataccaaattgtcactttcaggaagacatttacaatgaaaataatctggtttctgatttggatataacttttttgtattcaagcgtaagagaagaaggcagtacatatgtaagtcatcaactgaaagtgctgttctttacggagaatcattgttataatgaggaaatcagggaaactacatgagtgccaaaaaaacatgacaatactcatattgtttaccaaataaatgagtagactatccatatgatgtaatcatatatggggtccaaaccaaaaggaaatatagaatcatacgcggtttacaacattacaattgtaaaccgaataagtgttgttatttacgaagaatcgttgttgtaaacagaatttaggaaaactacatgtgtgccaaaaagaaagataacagtactcatatcgtttaccaaataagatgactatccataaaataagtagactatccatatgatgtaattatttatgggttgcaaaccaaaagctaatatggaatcatatgcagtttacaacattatgagaacagtgcttcaaaaattaaacaaagactatcggaacccaaaaaaacaaaagaatggtcacctaattcagtaacggaggctgggttgcactaattggattgattgattgtccctacctatgcaaaatggggacatatcca

SEQ ID NO: 485 - DNA, 2006 bp, Zea mays
taacgaaagatttttctagtgaattgggcatacagtggttgcattaccgatgactctctcctccttaatttgcgtccacgtaggatttttctatttaattgctgcttacgtggctgcttagagacagcgtattcaatgccgtcggttttcgttttctttagtccaactctttaataaatgttgctcagctctgatcccttgaaattcagaaacagaaaaagaagcgacatattagtttgaacaaccttgctttgtattcatgcgaacatcctggtagaaggataccaggaaatgaactactagctagttgaattggggatcattaagtaccttctgcagttctgcgcacaccatctgaagtctattttatatcagtgtatataacgttgtttcaggacacctgctaatatcgagcagtgagtactgaaatcctccctggcacctaatacctcgattattttttactatgttcatttttgcatggccaccgtcatctcgattcaaactaggccaacaatttgtgtcaggtagttattttgtacttttctggtcagatcttggctctagtttgtatggttaatttgcactgcattctgctgtagccgactagccgtatggtatacagattacagaagaaccctacaacagatggacctgatatatcaagtatattcaaacacacgaatgcctgactgatgtggctaggatggaagaatccacttttatgttagatggtgatttgagcactcgattggcatttctgcaattacagcaacagttttcacctctctttcatgtgtcagttacttgtttatgtactgtaccgtaggcatcacatgttctgaaaataggagatgggtttaggaagtagtgaggaaagtttaaaattgaaaccagagcacaagatgtttggattaaaaactttgtttttcctttctcttattcagttatttgtcttatcattaagattattacaactgttcagccgcttcgaatttaatagtgtataacaacttaaaaagtggcttcagatctgtacaacacatgtactgatttttttgttgctgtagggtgtctgtgtctcttggaagttatctgcctatttctcattttgtattcaaatcatgcttctagttcatttattgaatttactttgttgcagtgagactgccatcatgcaaagccctatcacagtatctggcacctctgcctccacaaaagcagcccctgatacatgtgggattcaagggtgggctgatctccctggaggcccactccagtctattgttgccctcctgggctccttcattgacctccttgccttcgcaagcacctgtcgttcttggcgtgctgccttctcatcatacccatccaaatccaggttctgtgccttgcttccacctctcctcgttaggcccaatgtctccgtgcgtgcacctgatggtcacgagctacgcagatggcaggtcatcgatctagccaatacaaaagcagacctttgctgccagattcctcaagaaatatgcaaggcgatgcatttcgccggctcctcctatggccagctgatatgcggccttcgcaaagattgcatcattgtcgatgtgttcactggggccagagtatgggcaccgccgctcccactcaacgatgacactttcttctactctggcatgctgacagctcctcttgcgctagaaaactcgcacctccttgtctgtgtggtgtccagccagcacagcatcccagcctcccttcttgactggtcagttggaagcaattcttggtcggaaatacagctcggtaactcactgatcgagcagatcgtggagttcaacggtcagttcatcgtgatggacagctactacaggctctacactctgtccttggccccccggcttggtttgcaggagatggcaactgtttggtgggacaacatgcctggatgcccattccgaaggccatggctgttggtatgcagcggcatgcttctaattgttgactactac

SEQ ID NO: 486 - DNA, 1138 bp, Zea mays
agtgatccgtgcccgtcctgtgttgcagaaatttttgccttggagttgtttggttagggaagacttcttatatttgagtagatgatgtcactatggtattgtatttgagatttcatttgtgtgtgtgtgtgtgtaattgttaagttatgtgtctgttttgaggaaaatattgatgtatgcttttgaaatttatatgaagaaaacccacgatgtctacccaaagatcagtttttgaaccgtgctgtctagattaggtttttcttttggaattctgggattttagatttgtggatggagatgtgtgtgtgactaacgtctacaactacaagaaccagtctatattgtcaaagcgaaaaaagaaggaaccaaaagataattcgtaacggttgacaggcagaacaattcggaactggaatttgacgtgaacagatttatattccatcatagtagcaaagcagtaactgttcgatattcaaacgtggatcactgttttttaaaaattttggtaagaaaatgtgtatagcagctcagaacaaataataagggcaagattccgaaattagaggaagatttcgtgaattttggttaatttggtgtgatgtaaggaggcctgcgttttcttgtgccggcttaggacaatggagcgcccttctgttgcatgggctgacatgatgtggatgctgtgtggaatcgagacaacgattgtaaccttgagttcaagagggactggtacacctagctgcaggtcttctgggtgtatccaagcatgttctatcgctgatggcaagtgattgatgaacttccatctgcttgtgctgaaacttcaccttgaattttcttagagaacataagcttgcattcacaatggatagtggccattatggtagatgagagtttgtagacttgcggtttccattcaattatcagctgtgttatcctttgctacttccaatcttctgtaccattaatgacctatgaacttgctagctattctggaaagcctggaaggatggatactgttacttgaattagtagtagagaaacattcgtaatgtgcctgagttcctctgtccacgtaaaatctgaagatgcaattgcttgtatgtatgcaatctgttcgtttgaatgcaaaataaag

SEQ ID NO: 487 - DNA, 693 bp, Zea mays
aacagaacgaaggcaagttacattcgaacgaaagtaaattgcatcacagcaagtaaaccttcaagtgtttttctgtctcacactacaaatattacaattatatcgaatgtttttcacacatcaaatgtatatggaccaaacttggcttcgttataaatttgttcgcggattctccagactatgtcgtctgcagccttctttgcttgtgccgcggccacaacttcggcttggatggcgacgtcttcagcctcggcttcagtatgttttacttcaattatcacctgcgaagtagagacttccaaccaaaatttagaaagggggcccacaatatatgtacaaatgtggtccataaaagaaacaagggaaaaaagcaccttcagcctttttctgctgtagactctttctaatgctagcagcattttcagtcgccttccgaagctgcaaaagaattggtttgaattttttttagaaaaaagaacatacacccttcagaccagtaaaataaaaataataacagaggaaagtagccgtatacaaaccttttcactgttttttattgcttcttcaatactgacttctttgccacccttagaccaaatgtcagataagaattttttgccccattctaaagcctcggtagtcgatcttcgaacactttcagccgagacttcgaagtcaggcttcgagcaagct

SEQ ID NO: 488 - DNA, 549 bp, Zea mays
gttgccagcttcagcttcctactctcatcttcaaatttgtctcctgcttctctcagctcagcttcgagcgagctagtgcgcttgtcctttttgacatttgaagctttgaaccctgaagattccctttccaaggcttccttgagcttattcttctcttcagtgagagtctgaacttcagttcgactcttaagaaagtcactctccaaaaccttgaaagattttttttcatcgcttttgttccgaagcctagatacttcagaccttagattcaaaatttctttttgggcagcttcgccattaatatttttcctattctttagagctttactcaaaaacaagccctgcagagttagaaaaaatggtgataatcacgctgcgtaacaaacaagtccgaacagtaaggtaaaacaatgtaaagtatacctttaaatgcgtgtagctgaggcagtcagaaaattcatcgaagggcatcaatgatagcccagcttcaagtttcgggaaaccaatgttatcgccatgtagaggcacacatcggtctcaaaattatct

SEQ ID NO: 489 - DNA, 2841 bp, Zea mays
catatcatgacgacggcgatgacagccacgccgaacacgacggcgagccacctaccgaccggcgtgtcgacggcgacgggcctctggggccggtaccctttggagaggaggtggttgatggagacgtagacgaagatgcccgtggcgaggcccatggagacggcgaagatccagtcggccacccggccctgcgtggtggcgtcgataatgatgccgatgccgacgccgacggggctggagatggcgaacgcgaaggcgtaggcgaagcaggagaggaggggccggttgggcagcatccggagcagcgcgatgcccatggcgatggccgcgaagatcttgtgcaggcttatggtccacagcgccttccatgcgtcggccttggtctctgcaggttcgataattagtagtagttaggtaataaggccagacagagtctcagagagctgctagcgcttagcgatgctctgcagctgttaacctcgaccaagaattggagacgctatgtttacgagaaactcagcctctccgtttaaattgattaattaaaatgggttccgaaatgctaacgaatagcacttgaaatgccttcagaattcaagtgaaatggtaatcttgacattcggaacaagtaaaaaagtatgcattcgaagagaacttgaaggccatatatcaggaagagaaagaacttcagagcgtccggatagacatttaaacctaagatcagaacaagtagaaaagtatgcatggcaacgactggactgaaccgttgcgcggaaaaaaaatatcaggaaaggtcagcaaagaagggttggaatgatgaatgatcagcctattattctggctgtgctgagtctgtaggctcctttcgctctgaccgaacagcgagacactagtgcagctttgacaaaaagagcaggttcagattccacttggtcttagtcacgaccacgacatctgtcactggaatcgagctaagaactaacgtaaccggtgttcagttgagacttcagacttgcaggtatatatgtcatacctacatgccataacatctcatttatacctaaagctgggcatctaatcctctactccgtactcagacgaagctaagttcgtcagtttagcccgtgacatgatggcgacatctgctgataagagtagacccggaatgcacataaaggaatttctacgcgtcatctgcaagttggaagggaacaaaacaacgcatccatatatccctatctctatctggcttagccttaccggcgatcccgatggcgatgccctcgaagacggagtggaagcaaagggctactatgagcagcacgctgtcaccgatcgtgctcgcgttgcgcagaatggatgcggccgagtgatcagatccgtgtgcatcctgcacgccaaagcacaagtaatggtgacaaataagattctgtacactgaccggccggccgtaagatactgctagtgctgttctttttaactgtcttttattgggagtggactgtactatatggttgttgcaagagcaggtattgccatgatcaaataatgaattcagaagctgaagcaggttgtagtaacttacagctggtgtgggctcagacctcgtgccatttgcggttctcatcttgccctcctccagccctattgaaagtgtcaaaaggagaaaatgaatcgtacaagtataataggcttcctaaagctttaatacagagaaaatatgacaatggaaatacagtgctgtagagagggacagacagacttcccctgatgactgactattcagagttgagcatatagactgattacacgcagaactgccagtttgtcacaaataaaactctaactaaatgatccattaagactgattccacgtaaagtttttttttttggtttcgatccactactctaactaaatgatccattaatcaatctcgctacatgttgattggctgaaggaaaataaaactctcaagaacaggattactgcaaactgcaatgaacccgaactttcagtcgccttgtacgtgataatgcaacgtgcaaccagaccaaaagcattggcaacagttggtttaccttaggcagtggtgtactactacagcaatataggattagtagttcgcgacgaaaagagtaaatctatcccaagaggcaagaacacactaacacagacctccaccaatctgaatttgcagcccgtgctagttgcacccacccggcgacaggaaaaagtggtgtgcgcattcaacccaaccccggatcccccagtcgttgtggcggcattcacagtaatcagtacaccgcccagcccaactgcccaaccccaactgttacaagccagaacagaacgaacgggagtcggtactgacacgtgactcttgttactgacctgcatcagaaccgccggtagcggcggtgccggtgctgcgcccctgtgaccgtgagacgacgtaggagatggcgacgtcggcgagcatggtgacgacgtaaccggcgcaggcgagcatgaacgcccaggggtacccgctgtcggggagcaggtccccaaacgtctcgtttgcgtcgctgaggaagtgcatgagcgccgtgccgaggaagacgccgcccgcgaactgcgtgcccagcgcgaggaacgcctcgttccagcgcatgaagtagggggacaccccgcccagcagcgtgccgacgaacaccaccgccaggcaccacagcttggcctccaccaggctccgcgcgcgcaggtccggcctggcggcggcgcccccatccgcgtcggcgtcggcgtcggcgtcggagtccccgcctccgccgtgcgcccacgcggcggccgcgagggag

SEQ ID NO: 490 - DNA, 3501 bp, Zea mays
tacaaaaagaaaaactggatttcataacatcagcgatgagagtatatctagagccgagggaccaagacttgtggctacatctacacgagttgatgttacctgttcattaaagtcgtggaccacaatccatgcatcgatctcactaactcgcgttttctaggggcctcacctcctgtcaacctcaaaactgtcaaaacgatccccgctccgtgactcgatccgttggagattcgagaacagagaggctagcataggttggttggagattggagagcagtagtccggtgcaggacactacggagcccggcacgagcattggatgttcggtggtccggacccacgggccgcggacgaggtcaggtcagtgatcagtgacttcagtttagttaagggaaagagcagtgtgttcatgggccgatagttcagagacaaggctgaatgcttgtccagtccctctgtctcccagcttaggttttggcccatgtgccttacccttactactggtcgaaactacatccggggaaattctatgcagtgtaagggtcatgttttggcagtggcttgtacatgaaaaaggtatccatccatctacttacagttacaggtgtcgtctgcgtcgaacccagaagttcttgacaaagtttctgcatctgtccttgttcatctgtttcattcgtgatgttcccttcatccatctgcgctttacttctctcacatgtgcgtctgtctttgtttcttgtgcggcaaagcagttgcatcgcgacacctgaatggagtttttttaaaaaaaatgtaatcctccttgttagatgccttattcatcagcccctatagctgttcttgccttcggatttgtcttgtggcggagagaatgcagagcatgtgtggggtggtggttcagagctggtatacctgttcgttgttttgtttccttgttaaaaaaaaaactacaccacttctcacttgatttgattgaactcgcgaatctctatgaagcgcgcgcctaccgaaggaatcggcaaaacgacaagccacaggtcgatataaaaaacctgctctcctgctcacattctacagcaacacgttttggatccccaaaatgctgcaatctgtaattgttccaagacatgttcagcctagatttgctcaaatccagaccttggactgttatgtttctacggtcctgcttcaatgtatatactgcattttcatgtaacaaaacagcaatcggtatggcaagaaagtgctagcattccctgtcaacgtactactagtaaagaaaaacttttgtggtaggagaagcatgtgacatgtggttcgttgcatcatgaagcccatgacaatttatgacaacgaagcccggatcgggtggatggcacttcaatggtttttggtggcattttgctttcatctggctaaacggatgtagcaaacgctctccactaggtttccagtaacccttagctaagatggaacagtacagtactgtcccaagcaactcgatctggtccgtgtctagctatgagctatccatttgtctgtctcttcaaagctcgaaaaagcaaccgctccaccacatgatcttggttctactctggattacaagccataccatacattttcagatgacactgtctaataacgatgaactgtataccggagcatacgccactaaaactgccaagtctgatcttgtcccttctaatcatgtctgtttcttcagcattaaccgcacgctctgcacccagagaagcatttcttgctgggacgacatgacaaaatccttgagccactcaaagcacctagctagactagagaggatctatcagcagcacgccctaggtttgacaaacatcgggccaaatctgctgcgatggttcgagtcaatggctgcttaaacattgcagcaaaaggtgtggcttgcaaacttttttcttctcaagaaagtggagctggcttttcctgtccacacggggggaaaacagaagcttttgctactgtatcatcctatggcctctatagcacatgtactttgtcacccacaaccactttccatgggaccaaaactttgggagccacaacccatgatgtgaccttgaaagagcaatcatgggtccaggtcagagatctggcccttttccacacacatacacacacacctatggaaaatgggtctaatcactggagatgagtggcgtataatcggccacaagatatggaggagataatagtctcatgcccggcggagtgctgacggcaaacagtagacgattcggccatgcatccgtgacccaccgctagctagctgctgcatttttgcgagaactaacgttcattgatttcagcagtgatattggcaatatatagagtggcggcggcgggcggtccatgaacagttcccggccacatgtgctgcctctgagccccagcagctcgatcccatgcaggcatgggcgcatccggcgagaagagaagaacccggccgacggatgagcccgtgttattagctaataagttaagaaatgcatggcaaaatccatgctaaattgttctcgtccttgctgccgaacaatggaaatgcttgtacgaatcacatgtttccactctgtactatctctttacgtaccacgggggcacacggggcaacacagatgaccacacagtaacaaactttgcctctaggctctagcacactctcatcacaggactaacgtacgacatgagggcatataagggcaacaagactcctgtgagatgagatccttgccatgcagatcttttttatacgtgcattgcatcttttcccgtgctccttccgccctttgttccttcacatccacaccagcccgcaaaagcaagcctcagctctcccgtgaggcacaagcgcacagcacagccataagctagctattgccccccattggatcgaggtgcagccaaatctaggaagggctcacatgcatggaggaagaaggtgcagtggaagtctgcaagacagtgggcggcgcgcggacaaagccagcctaggcctagctgaaatggactctttcctaggcgatgaaaagattggtggctggtggctcgttatctggtagagtcaatttatatattaggtttgctagaaaattgctcataaactctagccacaagatatgttaaaatagggcttacatgtttggtgctaaacaatgacgacatcattagggcgatcaagctagatcggctcaacgacgacaagctagacggtggtctttccttcgctaaccgagtatgtagagacagaccaagtcttatcataatttatatataggagaagaggttacgataaacgtcggttcacgtgttagccctctccctgttaatatgggttgtgtgaaatggtccgggccaactataaggttgttgtagccctgatgacgatcatgacacgtgagttgagtctggttcggtcaatcttttgaccgaatcggcatattctctccattgatctcttatttactc

SEQ ID NO: 491 - DNA, 1413 bp, Zea mays
cccaccatgccatcaactcaggtctcccacgaaaacgtctacacaaccccgagctgcgggtggtaggcactccccatggggttgcaaagtattaagcatgggtaatttgagttatgcctagatagttgtatttctcttcgattacactgtcaattttttttgtcaagacacatgtgtgatttttatggttggattacttatattttacccaatgtcaactgtcaatttgtccaattacgaagttggatttcaatggaagaccttgtttttcgtctttacaggagtaccctcacgctccaatctcctctagctctgggcgaaattgacaagagtcattgcctaaagcttcatatcgatggaactcacatttttcaatgcctctataatgagtactacggtgttagtgtcggtcgtcgggtcttaagatatctattttatatatgattgaggtcttatatctaccaagtaggatctatactttgcctcttcacttagaaattttagacatctatgtgcatgcttccaagcactgtaatccactattttcgttgtgccagacacttggtgttcctatggacagacttgtgcgagccgtagattcagtttcggtatgttccaattttcagtgcactacatgctcagctacacttgcatgtgaatgggctacactgcttggggttccactgctttcgtacatttcgcgagggagggacacatttggattttgcagttattcatgttgggacgagggaatggctgtgtgtgtgcgacgagtcagaggaggctaaaatatgtaggagtgtcatgcaaaaaataatattgtactaaactactggtgtagtatttggagatacctttcaacatttatagaaggaatgtcatgctatttaaactagattgatggcctagattttatggttaattaattgacaggtttattaaacctaaaagacacacacttcttgctacctaactaatgattgactgtcgccacgcattagaccgaacatcaacgtaaaatgagacacctaatggtagcataaatacttaactgaactaatgtgtagaaataatcggactaatatcttgctcagggactgctccttcctgtgctcgagtctactctgctggtacaagcaaaaacatgttctgttaaggaaggtacgtacacattacaacaatttggtgcatctctgttgctgtttctggagctttatttgacatgcttgccttcttgatttttgaactactcatgaactggactacatactccaacaaggccagtacaagcaatagataaataacttttcattttatccagttgcataatcatttggctatctactcatgaacaggatctgtcagtgcagataaggagtcacaagttgtaaagggtaatttgcatctgaggca

SEQ ID NO: 492 - DNA, 3435 bp, Zea mays
tgtcatgatggtaactcaaatttgtcgcctagctgaactgctgaagcatcatctttgcagttaggtagtattcttttgcgtggcatgcttcatttcgaggatggccagtccaaatctcgctctgaatgtgctggacttttaccctgtattctgtataacacttttgacacaacaccattctgaagtctgataggcattgtggcaggtcttgccattcccatccccctttctctactatgtaaacatttcaatctattttggttttgttttgcttcattgcatcttttgtatctcaataaaaaatgtggtgcttctttggttttttggaaagacattatagcattccgttactgatcaactgatgcatatacgattagagtcactcttcctaggttagatcctatgtgcattttccatttactacattatttgcttcagtttgataaaaatgggcaaacattgtcaggtggctagtcgtatgcacaagtttgatggccatggaaatggaaatcccaacagaaatcaccaagcccatcatagaaatgggcccaggcgacgttttcctgctgctaatggtgcaccaccttaccctccaccaatgcattatccccaacatccagggcaacccattttttaccccgtggttcccagtccaatgatactacaagaatattcttaccagccatttcctatcccagtcccgaatcatgaccggcatgttggaaagtctggttttgagaattccgtgcctccttttgttccagtagatcaagttggtgcccatgaaagtaacaggccaacgcctccacatccaagaggaggtcctcatctttggcggcctcctgttggcactcatggcactaggccccatccttctcctgaaggccatggccattatggacaggcttggcaaaatcctcagatgtttggtactagagaaaacacaaatctaccacaaggtcttgggccaagagcttttgtaagaccaatggtgcctcttggatacatcaatggaccaccatatcctggtaatgctatgctcaccatttatgacatgtttgcagttcagatttctttttagttttcaaatattgataaatgctttaaactcagggcctatccctcccatgtattattacatgcccactgtgcctatggattcgatgagaagtccatcacactacattcaaaatcaaccagctcctaatcctgttttatccccagaagctgctgagttaagatctaatatactaactcaagtggagtactacttcaggtaaattcttattatcttcctttggagtcataacaaagcgtgatgatacctataaacatagatgcgtggatttgtaacaatatgttgatagattctcatttatttttattgggtgctgggtagtggtgccaaatagtttattttaattggatttttgtctattgtcagaaacatgatgttaaaaagttcagtttgatgttgtatcacacttcaaggttgtaatgtcatggtgcaacatgcacacaaataccaatacagcctacaatctgataaaatctcatatgtttcgataacatcaggagcgattaaatgttcttttagcaagtgtggcatgcaatcctttgttcatgcaatcatgtttttcagtgatgcaaatctggagcgtgatgatttcctgaaatctttaatggatgagcatggttgggttccagtttcaaaacttgcagatttcaatagagtatgttttctttccagattgcttaatattaaatttctattattttgcccttgtgctaggaaacaactcatttttttatttgcagcttaagaaaatgaccgcagatatacacctgatattggatgcactgacaagctcaagtcttctagaagttcaggttgcaatgttatttcaatagtcattgttcaaattccatgttctgtttaggtatttggttttaccttatcctctgctggtctactgacaggatgacaagattagaaggcgttatgattggtcaaagtgggtctcgctttctggtacatcagttgcgagcccatcatctgccagtgtgaatagcagtgtgggtgagaagaacattggtggtttttcaaataaggatgcttattctgaagatcaaaagacgcattgtcaatccaaagatattagatgtaatacagatattggtatgggggaaaaagttatcgatgaacaagtgcaagattcacatggttgttcattgaataacgacttttctgtcatcagtattgatgaaaagactaagaacctttctgcacatccttcacgcaaatatggatcttcttttagatttggtgaagttcagaaaacaaggtcgaagatagtacctaatgctcagagtgaaagaggtttctctattggtttcccaagtgccttctctagctttggtggtggtggtgaccagagcactttcttgcttgatgaggagttggaactggaacatgtcgaccattcacgtgatgacctccattcacataaaaggtaattatagctggtatactctctattttccatgtctttattatttttttctaggtgtgtatgcatgtggtcaggggcggagcttagtgtagattaacatgggccatgaaccctcctatatgattctccactaatcttgtttctcgcgagcttattggacttgaaagtaatcatgaatttcattcataatccagtgtcacttgatgcatgcccccccttcattttagcccaagctctgccagactgccattgcatgtggtttggtgcaaattttctcaaactgcccaagccaaatcttgtctacttttgaccaatcttagccgccattttggttgagtgcttaagtttggtttgatgcctttctccaccttaatttattttgatggccaaagttggtcaaatcctggaccatttgccagccaaaatttggcttggctaagaacctaagaggtgacagtagcaaaccaaacataccttaagctttgtcaactttgcttcctttagccattgctcatatgggctagctacatagcttttttcttcgttgacaaagcagggtgtgcgttgtgaagaaacatgcccttagcctactgatgattgtttgatatttgctgcctatttttcaccatagttatgtgtgatagatgttcacaaacgtttccttatccatgtaagctgcacacttgtattttcttctatgttgccctgatacggggatactgatacgcgatacgccgataccccgatacagtatttctcaaaaaacaccgatacgccgctacgtaaatattctaaataaaattaaatgctgaaatagttgaccacacaatttcacaaatagtacatagacaataaagtttaggccaccaaggcatcaaacctaaaaacttcagtgttcagccttcaatttctaacagtaaca

SEQ ID NO: 493 - DNA, 926 bp, Zea mays
tagtcacatggctaattataacaaacatgcagcgcgggttaacgccactcgccgcgcggcgtaattagcgagggggcgcgagggtacaggcgtcattttgcttgctttgtcctgaccagtttttttccactgcctagtaacggatcaatggggccaggggggaaaaggacatggagatatggggacgaggggagcggaggtttgaaatgtgagggagaagcaaaagcccagataaaaaataatatcggttttgttttgcgtcttccgtttacgatttggggtgagcggcagtttggagtgggttcttgcagcggcgcggcagagaggtgtgttgtgcggccgtgctaggaattatcctgttccttcagtgctcgcgtcctgatgcgttttctccgacgatgatttcgtcgtggctacctgcatgtgctgctgctagtacgcggagcgctttgattcggcggaggcgttgcttcggttttggtttctttcgcccaagatttcagctttagcagccgcagccttttctcctcggccgattccagccttggcccggctatccccccttcaaaatcgcgcatagggtgggggttttactcggccccttgctgcgggcagcgcagaaatttttcctcgggcgttcgattgtcgcttagttgagcttcagaacctgattatttttgagagatttctggaggaattttgactcttgtcgtggaatttggggtttggcgggttgccagttttcagcccttggcgagttagaggctattgcctctgaagttatcgcctgttttgatgcgaattggggaaatttctggtccctgtgctgttcggctattggatttggcgagctggtgtttgagccctggtataaatcaccggtctgtgctggtggccttttgatttcccggtggtgatgctctctg

SEQ ID NO: 494 - DNA, 1440 bp, Zea mays
ttgagacgctaaagaagcgcgatgagcagcccaaggatgcgcctccaacattgccagcccggcccatgtgccgtggccgtctgcccaccaccaggcggccatcactgcctgctggctttaagctcgagaatggcatggtaacagttcctgccacagaagctgcagcggttgacaagaaggcagatgccaaggagattactgggttggaggtcaaggaggaaaaggcagtgaaaggatgcatctttgggactaagaggaagttccctagcacacaagtgctggaggagtcgccatatgttgatgaacttcatgaggagaggaagcgtacaacagtttgtaaagagcccccttctatttccccggcaacaataaatatgaacgggaagccagcatgtacagatatcatggactatgttctccagaaggtgagaggcttgttcattgtggagtttgtaagaattatttctattattgtaaatttgcaatgtgaagaaatggaagtaatctgactacattgtctaacctgattgcaacatttcattcatgagtcaaaacaggaaatgttgatcaaattgtcccttacatgtgtttgttatatgctgaattaatagaccccctttttttaaagattatttctatatggtatatgtgaataagactttcatgtgagaacgtggttatgtttgggttatgcttagcttactgtgtttcacatttaccagaagatacagttagtgatcgcttaatgattttttcctggtctcacacttcagatttgttttggccagtttgtttgttacatccacaaatagctgcatgtcatgttactttaaagtttaaaccttataagtatgagtatcggatgaaagaacctgtttttttaaccttaggatatatggatactggatattcagaaagtgttgtttcttacagcagtataggtctcatggaactagttctcttatcacttgatggttcaactttgatgtttataggtttatattgtgattggaagaaccgtccgagataataattttttttatcgattttcagaagctacgagtttggtgttcttcatcaaatgcaaagtgggaacttggacagatccaatcaatatctggagatgatgctgaaatactcctggctaatggaaaagtgagtgtcttatattctcacggtggtatagtcacatggggacactcctgtacaattcttactcaatgtttattcgcgtaggttttgacggtgtcaccagaacaactcttgcctgccaaccctgatatcctcgatggagtggatgatttaatccagatgagttacttgaatgaaccttcagttctttacaatctgcaattgcgatattctcgcgatcttatctatgtaagcactatgcaatagcttcatcatgctaaatatgagaacataggtgagaaccaatac

SEQ ID NO: 495 - DNA, 1046 bp, Zea mays
aaaagactacaaatctcggctgaaggatacgaaggtaaaccttaataaggttggcactggcacccatgatgataaatcgcggaaaagatggtggggaaagaagagctccaagtgaaacgtgtgagaggtgccccagatcatttttctactgccccgggccaaggaaagcggccaagaatgccagggcagacatgaagaacccgccttggttctcgcactgcagaagcctggcaagataatgatgagctccatcgccggtgggtggcggcgctgttactcgtccagagtgtcaaacagatcaaattagccaataggtgaagcaagagttctgtacatgtatatcaattaaattagttctgagttttcagttgacagtgtatgtatgctatcgtgtatgtatgtagagtgataaatctgagatgtggaagggtaactagatacagattatccaccatgagcgaatagagatgcaaaaaagcagtattgtaatatgtgtacatacagtaaggaaattgttgaaatgtgcaaggcattttactctgaaactttgtttgcatctcgcagtattatgtacaaatcatttgaggtacatacactgcacagcagttgaatcctgagtttggacataatgtcctattgtaattgtcaggctctgaattctgcactgctgtgctgtcggatagcttgtgtttcaaaaaaaaaaaaaagtagacacaacacaactacatgtatgtacacaaatctgttagcaactgaaacggagcatacatgcatggaatgaagatcaaaactagtccagtacgtcctgagttctgagagaagcacacgaatatttgcattctttcatcgtacgaatgtaatgtcacaacacaaacgactagtctaaaatgtgggcacgccgtacgtggcccgctagctcaagaccgtggcgcgaacttggtggcgtagacccaagcgttgttggccacggggtcgtcaaggtggtcgagcaggttctcgaggggtcccttgccggtgacgatggcctggacgaagaagccgaacat

SEQ ID NO: 496 - DNA, 2473 bp, Zea mays
gcgacaacttgtccacattgcaagttcttctgattctgtccgtgataaaccatatgtgcagccactaaaggcaagcatatccttctcatagcgcaaatgcaaagcaatatatttcccaaatgacctcatcctctccaccaatagctgcaagaaaatcagttaatctttgcttatctaaacaacacacggtatacatttcagggaaaataatgatcaagatgggaagatatgagagagtgatttactttgcctagagcttcaattgggggagcaaatctcagtgcttggaaaaaagcccgacaacgaagcttctgaatgtcaggaggaaggtggttgtttgcaaggcgggaatctgacttagcagctcgaatgacctagtacaaatcttcaatcagtattcacagttccaaaaattgcatcagtaaacatggcttagatttgtctagtatggaagtgcaaagtggtggttgaattcagacctggcgatgatcccacagtggagaaatctcatcctggtaataatctactccagaccaactcttgaagtacctgacagactttggagctttcaccaattcctttggcagttctttctcaactttcacatcatttgctaaagaatttatgaagtgttcttcatcaaatacatctgaaaagttgctgatattgaaaagtggtttcatcagtctcttatcagttcatggaaggatgaaaacaaacccagcatatgatctaccttttgtcatgccaaaatgatttcttatcaagctctggaatgatgagtgtagcattaagtacgcgtgcaacagccaccatatcactgatctgccataagaacaggaatgttcaattaaaaaggagacaaaacatttgaggattttgtgtccaaagtgaggggcctcttattattcatttagcaacacagatatgtatccagtaaacaaagaacatgtgcaacaaacagtaaagaaacattcccctttctatatccaaatcacatgaagctgacattgagagtattaggacaagtaccaattggcaaaaaaaaaatcggttatcttaaccataagggaacctaaacaaaaacagagttttcattaaactcaagtgcaaataaaacactactagtagttagttccagttatctaacaatctgcatgcacaagtagagtgtaactgcttttggtctcccctgctaaaacgaacagctttctttgtccaactataaagaaaaaacaaaatcatgattgaaacttggcatgggtatgacagaagcacatccaaacaagtgtcatttatcagaatcagaaaaataaaaatgaacatgatattcaataccaagcaccaggaaaagaaattggaattgcaacgagaaaacatccacccaccaaaaattataaggagtaaccactctatctttaacgcagttgggccattcaatatgtgtcgccagtaactcaattaattaacaaaattctaattgggaaacaaacagcttaaatttagcccgccatatacatcttaaacaagcacatccgacatctctaacagagtggaacattagcaccagaataccaactgcacgtgattaaagcaccaaaggactgctcactgcccacagacactgggttaggcaaagcacattgaaagcaccaaaaattgtatgtgcaaaaaagaagagctgataatgatgggtgctcacaaaccgtcaactctgatcaaacaccccacatgcctgaacgacaatgctctcccacgcttttttttagatgagatattggccctccccactcaagtcaacacatctaatgcgaatcaagcaatgaataacttcggtcatcactaaggcaagtgataaatttccaccaggacggtccagcttaccccagcgcgcatctggttgagtccgccattggtgtgtacgagcaagtacccctttgacgccaccggacctgcaatgcaagatgaacaaaatcagaactgcgcacaataatttggaccatgaggcgagaaatccatgtagagggaggtgtgccaataatgcgcatacttctgtattccggtgacggcgccacgcagggcacgaacccccgcgccggcgccggcagccacagcctcttccccaacgcgtcgtcggccgcaccgtccagctgtcaaatctagagattaatcccggcgtcataggctcccatgaattcaaaaacagaacaaagaaagcaacagcggcggcaactagcagcgaaacagcatcgtggagaatcgttcacctttcgtgacgacgcgagctggggcgatgcgaactcctgctcccaccgcagctcctctgtatcccatggctgcgagaggcggtagggcgcgccggaggagacggagggcatggcgaggccggagacgtggagagtgacggcgagcagcgcggcggcggcggtgatgatggcgcccgctgcggcgagggagagcagccaccaccgca

SEQ ID NO: 497 - DNA, 1039 bp, Zea mays; identical to SEQ ID NO: 349

SEQ ID NO: 498 - DNA, 1520 bp, Zea mays
gatgccttaggctcccaggcaaggagacgcggacgccttatggccagagcacgccttagcatttaggtgtcgcctaagcatcgccttagggacgccttaacaactatgatatgtagtactaaaatgaggtgtttcaaatgaaaataataaaagcatatggctgcaagtgggaagtaacactgcattcagattccaaagtttatttctgttgaatacgaacacagttgtagcatatttgccattctgaacgcgtaagattgatttagtttccaacatgtcctcaaaggctaagcgtatctgaaggaagaggctaatgtcaccagataaatagaaaaatggaacaaggaccaaaacatggaagtccctactgcaaaattaaggcttacacatgggattatggggaaaaactattttcaaattagcacagttagatgcacatgcactatcatatgccaataaaggacatactcactttaccaggtaggtagctaagtcaagagtgatagcttaccaagaggcggtggaatacttttggcaatggaaagaaaaaaaacatttaaaacaaaaaaataggaaaatgaaaatagaaagcaacaatacattagagcatctccaagagtctctgcatggctatttatcacaaattacaaaatttcaaaaaaaatcaggttccaatagactttctaaccactctttcaactctccaaaaccactcttgttgctctgcactagcgaagaatctacatcactctttaaattccatatatagtagttctatcataaatttttgacacaaggaaagttactacaagtcattcgagtatagaactatagataatgaaattaagagagtccatgggaaataagagatacataaaagagaatattcatcggatggctctccaactagagataacagagatagaattttagagaagctctttgagttactattagttatcacatcaatcaatttgattttttatagtacctatagctaatttgacacatgttgcaagaaactagaacttccggggaccattccagaaacctacaacttcctcaccagaaacattgaaacatgagaccaccagtgacatgctacaggggctgacatgtgggttcacggttagaaagttatagtgatggtcttctgcaacaaggtgccaagaactcaaaataattgtaggtttctgcaatgagcaccagaagttgcttcctacaaatgtgtcaaagtagttgtcaatttttaaattttacttttaaagaaatcgttttagaaaaaagaacaaaatagacactaaaatgcatgcagtcttcataagtcaaaaagtatgaccacctctgtacatttagtttcttagattgcaaataattaagataggttttacgttaaagatggtgttaatgcccaactgtccaagtaacacccagctgaagccagagcataacgagaaaaagagaacacaagataaatcaccaatcatatattcaaagtaatcatataatattgtttctgc

SEQ ID NO: 499 - DNA, 535 bp, Zea mays
ccggatggtgttgccatgtatagcaaagcaagcgccttcttcaccggtcaccactcattcactcactcactcagccctcttctctccctccttctcagtctcccactgcggagacgatcagacgggacgacgctggttggctgataaatggatggtccttcctggccgctgcccgccggccgggtaaacactaacgcagtgccagtgctgctgttcctgctgccgctgcgtcctagtcctagcctagctaccgctggctggatggtgggtgttacactgttactacccaggaggggggagagttaccaggtgcatgcacccacggtaaaaaaataaaacgaaaggccgccgcgctctcaatactgttgccgcctcccaacagtagagatccctgctcgaccgcctgcagcgtgcgtgcttgctgctaccgtccaagcccgggccttgatggtgtgccactgttcatccattcaggccacagttaggtcgtcgacgtggccgcttgcctgtgcctgccgctgcggtgctgcctgcc

SEQ ID NO: 500 - DNA, 1863 bp, Zea mays
ctcctctctctctctcttcgagtgaccaacccagcgatcgagccggcgctcattgccactctcgcaccagcccaccacccgtccgttccttgcctgtttatttgtttttaccgcggggttaaaataatccggcctgcggtgcttcctgaccgttgtgccctcgaggcgacgcctggattttccccggggacaggggcgtttcggtcgctgcggccacagtgcacggaggcgccctcttggtctcccgcggaaaggatggcgacgagccgccggtcaaagcgtcgcaattattaccggtgactagcctagcgggctcgtcagacgcccaggcctgtttcccgccccccaccccccacttcccttcccgctggaattattaccgcgcacgcaccgcgttgctcacgttataagttgcgcagcgcacagcacagcacgttcacatgcacgcaggaagaacgggtaaattcgatttacccatcattttacgcagcgtatatgtactgtgacgggctgtaccgtagtatttattgtataacgatgttactaatgatcgtagtgttgtctgtgtgtgactgtgtgctcgacttgttgggccaggtgcggaggtacgtgtacaatgacgtggtgcgccttgacgacctcgagaggctcatcgactgctccttcgtccaggtgatgcgcggaccgtcacgtaccagctactgtttctgctgccggcggcggctagctaaagggggatagtagcatgcagcggtggtgaccggacggacggacggcgccgcggcgtgctccgaatcgttttgaattattaaaaatcctgacccatcgtcgttctcatgcacgcatgcagccctacacgatcaacagtgccaaggtgatcttcctcaagccgcggccgcagtccaggcccttcaagggctctggcaacgtctgcttggcctgtgacaggatcctccaggagcccttccacttctgctgcctctcctgcaaggtacacagtgctattctgctgctgctactactactgtataccaccaccaccacccatacaagactacacgcgtgccaccaaaaatcttctacatatgcacatgcacgcgacagctgctaagctagcagcgtgatcggttgacggattattcaagcgtgcgtgcgtgcgtgccataatcagtcgcctggcacgtacgttagtaagttattaatcagccgtacgtcgcttcactcgcagtagtacgtttgcatgcacacgcacgcccatgcacgcttagattagatacggccccgtttccgtggttactgtacgctaaacccagctgtgggctgcacgcacgcacgcatgcaggtggaccatgtgatgatgcagggcggggacctgtccaacatcctcctgtacgtgccgggcgggccgccggacctgggctgcggcttcccgcgcttcgagaacctccgcttcgacgacgaccccgggcagtacgggcaggccacgcccagctccatcctcgaagaccccgtcgagcacgggggcagcgccagcgccagcggaggatccagcaacggcggctcggccaggaaccacgcgcggcgcgacgtcgacgtcccgacgaggaagaagaagagcggcgggggcggaggagggttcttccctcagatcgtcctctcgctcggcaacaggcggaagggcgcgccccatagggcgccgctcgcgtaacggacctgcatgcacagatgtcggacggactccaccgccgtcacgtcgccttgccgctatatatatatatatgtgtgtgtgtcctgcctgttaattatgtcgtttattactaccacccttagttagcagtgttgttagcaacattgcttaagtgt

SEQ ID NO: 501 - DNA, 2291 bp, Zea mays
tcgtgaccctgtaaataggtgtccacgcaaacgtataccatactattcacgtgcttttgctactcttagaatgatctgcctctaaagctacccaagcattctcacactcctataaggtaatgtattgtaatagaatgtgatcatcaaggtagtataacagatggtgaacatggttcatgactcttccacttacacattttgcctctctcgacattcgtacttctgtaaccttcttcccatgtttcccacttttttcatgagtggacaaggggagaaagtgtttttaatttaattgtgttgtcgtgttatggtttctcataggagctttgataggtgaccaatatgcaaccttctagaaccttctacaaacaatcatggctaaccatgatacatgaaactttctagaaccttctacaaacaactgtggctaaccatgatctatgtacccttctataattttctatagcaatcatgataaaccatgaagcctagatatttttgccatgaagaagtcacctagatattgtggagaccaacaatcgtgatgaaccatgatgcctttttattgccataaagaactttttaacataggaccgactctagacctagacgagaggggcgactacctagggcccaaaccatcaggtggaccaaaaaatttattttcgataaatatagttagtaaaaattgctatatcagattatgtccataaatgcttcacttgaatagattaaaggggtcatctcgtattttaagaagtatatatatgaaggtttgagttgtaccattaatattggaatataaattgcaaaagtgatggatgtggaaccaaggtttcctacaaatgccaaggtaatcgaaagaaacattttgatgagcaaaatgatcaagatgaggattaaacattatcattcatagagtccataagatttaattattttcttataatgattgttatgccaattaatttattaaatagttgattcgagcaattacatgcaacattcttgaaccttctataaacaaccatggctaaccatggtaaatgcaaccttctataatcttctacaacaatcttgacaaactataaagcctaatatttgttgcaatgtggaactctatagatatttgtggagacatctctagaatggggacatgtgtctttcacccatgctcacgtgtaactatataagaggtgtcacccgaccagttgccatgatatacaacataacaaacttccaccacacacatattgggcaaaaaatgttgaaatagtgctaaacaaaaaataaaaatgaaattgatttatattaagtctagcataagcaacaaaaatgttgaaggaagatctaaaattgaaatggatgtatactaaggctaacataagtaatataaatgttgaagacaaagtcaataatataaacaaatagaatcccatattttataactgaatgatcatgaagaacgagttaatttaaaattttttaaagccaacttttggattttactagatcagtaattttctaacggtgcgatttatatttcgactttattaataagatctttatttaacattaatagtttttttaatgttttgtcaaaactataccaataatatttatcgaaaaatattaacataaagtaaaatttgatcccaattttcattaaattttgtttattatcagattgtaaatcatgcttgtttagttctgttatgtcggaatgtatatactagtatttgaaatgtttatttattataaaaaagtaagcttttaatccactttaaacaaacataatcataagattaaatattgtttatttaatgtacgttttatacaaagcataaaaaattatgggactaatgaatattaattgttttcaagtttgttgcagaatataaagattttagacatatcctaactttaaatcattttgaagcactaaatgatgtattgtttacaccgatagtttttacaaatcgatctaacttgttgttttgcatgcttcatcattaacacaagttcaaaacaataataaaatgagtatgtgacccgtagaattggattgtcatgtactatcactagaatatttcatatgaataatgaggtgactttgattattaatttctgaaggcacaagttatatttctagtatctgactttgatcattagcaaaaattaatagtttttcatttgttttttgtcacagttattcaaataacatttctttgtaaatattaaaaaaatttcatatgaaaaataaggtggctttaatcgtcaattttcatatc

SEQ ID NO: 502 - DNA, 919 bp, Zea mays
ttgaatggaaaccgcaagtctacaaactctcatctaccataatggccactatccattgtgaatgcaagcttatgttctctaagaaaattcaaggtgaagtttcagcacaagcagatggaagttcatcaatcacttgccatcagcgatagaacatgcttggatacacccagaagacctgcagctaggtgtaccagtccctcttgaactcaaggttacaatcgttgtctcgattccacacagcatccacatcatgtcagcccatgcaacagaagggcgctccattgtcctaagccggcacaagaaaacgcaggcctccttacatcacaccaaattaaccaaaattcacgaaatcttcctctaatttcggaatcttgcccttattatttgttctgagctgctatacacattttcttaccaaaatttttaaaaaacagtgatccacgtttgaatatcgaacagttactgctttgctactatgatggaatataaatctgttcacgtcaaattccagttccgaattgttctgcctgtcaaccgttacgaattatcttttggttccttcttttttcgctttgacaatatagactggttcttgtagttgtagacgttagtcacacacacatctccatccacaaatctaaaatcccagaattccaaaagaaaaacctaatctagacagcacggttcaaaaactgatctttgggtagacatcgtgggttttcttcatataaatttcaaaagcatacatcaatattttcctcaaaacagacacataacttaacaattacacacacacacacacaaatgaaatctcaaatacaataccatagtgacatcatctactcaaatataagaagtcttccctaaccaaacaactccaaggcaaaaatttctgcaacacaggacgggcacggatcac

SEQ ID NO: 503 - DNA, 1506 bp, Zea mays
gaggaatctggcagcaaaggtctgcttttgtattggctagatcgatgacctgccatctgcgtagctcgtgaccatcaggtgcacgcacggagacattgggcctaacgaggagaggtggaagcaaggcacagaacctggatttggatgggtatgatgagaaggcagcacgccaagaacgacaggtgcttgcgaaggcaaggaggtcaatgaaggagcccaggagggcaacaatagactggagtgggcctccagggagatcagcccacccttgaatcccacatgtatcaggggctgcttttgtggaggcagaggtgccagatactgtgatagggctttgcatgatggcagtctcactgcaacaaagtaaattcaataaatgaactagaagcatgatttgaatacaaaatgagaaataggcagataacttccaagagacacagacaccctacagcaacaaaaaaatcagtacatgtgttgtacagatctgaagccactttttaagttgttatacactattaaattcgaagcggctgaacagttgtaataatcttaatgataagacaaataactgaataagagaaaggaaaaacaaagtttttaatccaaacatcttgtgctctggtttcaattttaaactttcctcactacttcctaaacccatctcctattttcagaacatgtgatgcctacggtacagtacataaacaagtaactgacacatgaaagagaggtgaaaactgttgctgtaattgcagaaatgccaatcgagtgctcaaatcaccatctaacataaaagtggattcttccatcctagccacatcagtcaggcattcgtgtgtttgaatatacttgatatatcaggtccatctgttgtagggttcttctgtaatctgtataccatacggctagtcggctacagcagaatgcagtgcaaattaaccatacaaactagagccaagatctgaccagaaaagtacaaaataactacctgacacaaattgttggcctagtttgaatcgagatgacggtggccatgcaaaaatgaacatagtaaaaaataatcgaggtattaggtgccagggaggatttcagtactcactgctcgatattagcaggtgtcctgaaacaacgttatatacactgatataaaatagacttcagatggtgtgcgcagaactgcagaaggtacttaatgatccccaattcaactagctagtagttcatttcctggtatccttctaccaggatgttcgcatgaatacaaagcaaggttgttcaaactaatatgtcgcttctttttctgtttctgaatttcaagggatcagagctgagcaacatttattaaagagttggactaaagaaaacgaaaaccgacggcattgaatacgctgtctctaagcagccacgtaagcagcaattaaatagaaaaatcctacgtggacgcaaattaaggaggagagagtcatcggtaatgcaaccactgtatgcccaattcactagaaaaat

SEQ ID NO: 504 - DNA, 565 bp, Zea mays
tgttatttatattgttcggatgttatttatattgttcggactttggacgtgtttttcaatacacatatagacatctgtgggctatacatgctcttaagacccatacaggaagctaagatatccacatggaaaaaaaaacaaaatttccttcatagtgtagcataataaaagcaaacgtacaaccagttcccgtttgcagaggaaccgtgacatacacacagtcacacacacagagttacacacgacatcaaaattcatgtctgctaggttaaattcatgagggagactactacggagcatcgaagtcgcgtcttttattgtacacatcagttacagcgcataaatctgtttatgtctgctaggtcactgaccaattaggcgcatcgatactagggtttcttccgttccgtacacctcacaagcacagcatcaaaatccaaaagaaaccaaactgcaatagctcgactcgggagatcccccggacaacaagaacaaatgcgccacacgattcctcggaatggttaattaagaagctgaaggactaaagaaaccgcagaatggaccc

SEQ ID NO: 505 - DNA, 507 bp, Zea mays
caattaagtctatcgtcaaacaacttcactgcgtagtttcagtagaaatatatttaattaaagtacatatgaaatacaaaactatttcagctagacgaaaatgttatctttattttaataatgcgaaaactcacaccctaactctagaaaatgagcaaagcttcacattatcacaaggaaccatcagaggccggtgcaaattcatcatcaaagatgtgtgcttcatttattatcgaaataagcttgataaaaaggtttataaaatatataaggttcattcacaaacctaaggacctccaacatcctccagattagaatatgaaatagacataatcaagactgcaaaatagattacaaatacaaacacaaaattaatagcccaaattcagctcctgtttcagtagcaatgagctaaaagttgacaaatgatactccatttagtcttgatcttcccaaggtttgcatagatagaattttcttattcatgatgcagtagctacagtaagg

SEQ ID NO: 506 - DNA, 2472 bp, Zea mays
tgaatggaaatggaacaatgtcatcgtgtggaaaaaagtgaaaaaaaaactgaataacactgcaggccaatgagtgaggcttgtaagaactgcgtgtggtgaggaattcctcccgcaggccgcggcacacactcagattcaatttagagcatgtggaatcaatcaaacacttactccagtgaggagcgagctgattcagccgttggagaagcacgggtactatttaaaccgctgcggatttattatagaggaaaccgacgttacctccgaagaggcgcccaacaagaacagcgggacgcctttgtcgtcctcggcggcggcgcggagctgtggttggacagttggagcgactcttctgtcggacaagacgatgagcacggcgcaccctactttgaggccacacgtccacaacagccgtccgatcgcacgacgacggcgcaaagttgaaccgagcgaggacgggtctgggctggctctggtttgagccgacgaccggacgacgtgcttcgcagttcgcacgaacaatctggactggagtcgagttctgcgcaagagcgggcccgcccaaaacaataggtggcctcctgctctcccatgcatctccgtcggcccaacaatacagagtggcccaacttctccaatgcgcaactgctgtacgctcgacgtgaaggcgcttctcccaatctcccctccgactcccgttcctgcgccccaaaccctaggtccgttcgcggcggcggtggactgccagtggcagctctccgctcggcttggcttgggcagctgccgcgccgcgcacctacgggcagcggctgggcggcccgcgctcgtggcagcacccgctgagactgagaccgccaccggcggttcctgggctggaagccggtgcagcagcaggcagtagccatctcggccgccagttccaaaccctaaccgagtaaccgcagccgcagccgcagccgcagggtgcaggcacgcaccagcctcacgccagccgcgccgccgctccggccagccgcaccccgtgccggccagctgcgcccacgaaggtgaaaagcagctttacttgccggcttggttttaagtacaattcacatattaggcttgtgtcatcaagaccatgactaggttagcatctctctgtttaacacttcaacatctgatattgcactgtttctgataaagttcaactcgagtatggctgtgtttcatactgttcgatgtgcccttacgctcggtgtttcttttcctgatttcctttctaaaaatagtttaatattttgggttgtaacactggaaatctgctcctttaacatttggaggtggttattccctgtttatcagggttaaaagccaccttttctttatttcttcactggaactctactttctagtaatatgacaaacaaggttaattggtgactaaaagaagtttgactctgaagttcattatgttgttaagtacagctgtggaactctatttgcaatatgtttacaatttattctgatcacgatcacattttaattttcttgattatatgtcagaattgcttaatctgaaatcttcagtccaagggaaagggaaagttccttcaggctattttaatgctctctataattaagtggagcttggttgactgatgccaaagagaccaagcatctagcttcgactgatatttcatttctttgtactacttgcacctaaaggcttctccattagttctttgagatgaagtaaaaaaaaaggctgttccatccaagtgggatcctgttgcattgtcattaggactaaacgtcggccatccttgttcattgattgtggatcagagcagcagtggcatttcaatagtctcgtgagggtaaaaaaacccaggcaaaatgagttaaaaagtttattttttatctttcacggctggttactctgggagagctgggtcgttaaatgggtcaccacctagcgccttttctaaccttgagtaggtttgttgtaagcatgcttatttctacctattaatctaaatgtgcagcaaatttagatttctgacgtcctttcagttgaccttgtttgcagttccattatgacaagttctcctgtcgtatactgttttcctttcgcttttgtatacccacggtattgatattgtttatcagtattttgtgtataggaatctcaacttctttgccgaggtttatcgacagttgtatttgttgggaaaagtagcagtttgactctatataatagagagtgccatggacggacctgagtctagtagaggtcgcagtaagcaggaggttgatgataatgttaatgcaaggaatacttggaaggaggagcaagaaaatcaggagaatgtggatagcagaaattattcggatatatccagaaaacatggatatgaacatgaaactgggcatcaggatgataatagaatgattacaccttcaaatgataggaatgaatcaaggaggaat

SEQ ID NO: 507 - DNA, 2639 bp, Zea mays
ctgagaagggactcacgatctcctaaagttcaaaggagaagccctgatgattccaaggatcgagactatgatagaaggaggggaagaggggacaataatgattgggaaccttcaagaagatttagccctgatgcttctgctaggagttcagagagaagagagggtagtagggagaagcaaggacaacgggatcaagatgaaagggcatcagtcaggagggtagatgaagtttatgttgatgaaactggtggttctcttagagttgacacaagagaagcttatagagatgataaatctgacagagggagggataggaattggaatgagaaaacccgagacattgaaggttctaaggactatgggaggaacactcaattacgagatactaaggagccaaatgattttgaatggaggaatgcacaggaaaggctagatggcgggaatttccatggccgaactggatatcggagagattctaggggtagatctgaaagtattagaggtccctcaaactatgggaaccgatacgacaattcagactcaatagagattcgacctaatagtaatcttaactttggaagagagggctctgtttctggtagaagatttgaaaccggagcacaccgagattcagtacctggaggaactgatgataaatcctctgatcatcttgaaccagatccaagtggtagcacaagcatggtttcttcgtttcctcaacaaggtccaaaaggcgataggtcatctagaggaggaaggggtagaccaaatggaagggattctcaaagaattggagttccaatgccaatcatgcctcctccatttggtcctcttggacttccaccaggaccaatgcagcatatggggccaaatattccccattctcctggtcctcctctcctacctggcgttttcatgccgccatttccagggcctctagtgtggcctggagctcgaggtgttgatgtgaatatgctttctgttcctcccaaccttaccattcctccagttgctccagaacataggtttgcaccaaatgtgggagctgggtctagtcataatatccacttaaatcaaatggacactgggttaggtggtccagcagatatatcaggtttgggttacaataatatgggtcctcaaagccgtgaaatgctccatgataaacctggttggatgccacataggaacagtggaccaaacagaaaagctccttcaaggggcgaacaaaatgattactcacagaactttgtggacactggcatgaggcctcaaaatttcattagagaactggatcttacaagcgtagcagaggactatccaaagttgagagaactcatacagaggaaagatgaaattgttgctaagtcagcttcaccgccaatgtattacaagtgtgacctgcgggaacatgttctttctccagagttttttggtaccaagttcgatgttattcttgtggatcctccatgggaggagtatactcaccgtgcgccaggaatcacagatcacatagaatattggactgctgaggagattatgaatttgaagattgaggttttccccttttctttatcctttctattttgtgatttcatttatgctgcagaattaatatttagaagtgtattttttgaatcaacaggctattgcagatacaccctcctttgtgttcctttgggttggtgatggtgtaggccttgaacagggtcgtcagtgtttaaagaaggtagagcctgctatttccgtacttaaatgactgcgctctatattattattgtaatgccattcgttttgggggatggggtgggatcttgaaatcattttttaggaggtcacccaggttcccgcagcttcaaatcaatttttgccctctgatggaatgtcgtagcaacataaacattgtttcatacttccacagttttatttcatgtatgtgtgttttaattttcagttgttgatgagctgcaataacaagtagatgaggctgactgaaatttttctatgatcagtggggattccgtaggtgtgaagatgtttgctgggtgaaaacgaacaagaaaaatgcagctccaagtctgcggcatgactcacatacattgttgcagcactcaaaggtagtgttgtacttgattagtatgtgatgtatcattttctgccatgcctacatgtctttttcttcttctgtttttctctggttctcatgcgaagtatctaccctttccatgtgcaggagcattgcttgatgggcataaaaggaactgtgcggcgtagcacggatggccatgtcatccatgcgaatattgacacagatataataatagctgaagaaccaattgatggtatttttcctttggtttattagttttgttcctattcttgatgcaatctatactattggcttatgaccaacggcaatcattttcaatgatgaggtgcatacactgagtaaacttgttttctcgaaattttcttctttgctttctttctgttgaaaatggagttccctgatctgtttttattgctgccatggtatgaatattccaattttgtccaccaaaatgtgttactgtgttgtaaatttggcttggttggcaaaaacatctgtcttggatttataggaatttgggattataaac

SEQ ID NO: 508 - DNA, 2419 bp, Zea mays
ctggctgaaggcccctctcagtagctacttcttgcagtactacctagatgctttgttgtgcactattaaagacaattattcttgtgttttcagatgcctttcatgggtaatctattaggcactacttaccttgcacctgattacatgaacaattgtgaagtttacttgaattcatgatttctctgaaattgtaaattttgtgtttcataacccatgtgttcatgtatttttctcttctttttgcatgtagtgctattgttatcaattaaatagccaggtagtgctctaatattcgaatattgataaaaatgaaatcccaatcataaactaagttcaaatattatcattctatatacattatcatgtgttatgtgttgtacattctccttgtggttgcaactttttattaaggatttaagcatccaggtgcatgagcctaaaatgtcaagtattcaggtcagaggcagtagttattatacgacacttatttaacagttgtccaatccatttcaggaaattttatgttatcaattagacctgatatttcggaacattctgaaaatattagccggttagcttcagtgaagtggtccgaggacatcattggtgaaaaaaccatccgaatatctgggattattgaaaaacttaactataacctaaggaaggccttcaatgttgattccatgaagtcttctttcagctctctaagttgccctgttttttccaatgggcatcatgttacagatcttcactttttaattcatattcttggtagagatgtgcctgtgcagcctacaaatggatctcgagttgctgaaagaagtgcaccagttgctttacagttccagagacaaattttcatatatccaactgtgcaagtgtataatttcttgcaaacagacatacacgtgcttctgacagattgccaacagggtaaactcttatgtacgagcatttagttttggggaagtggatgttcctgttgaaggaagcaaacaataaaaagatatgttttacttaattcttttgtatactataatacaggaaacgtcatagaagatggctttggcggtattggcaagcagacaacaatcataagtggttcaagtgcttatttctatgtgaatcctacaatgtttaatttctcagtcacactgatttcatatggttcaaagtctaagacagttaatagtagtgattgggttaagagaatgcaaaagcagactagtaaagctcagtttcttgacatgcaattagaatttgttcctgggaagtttcattctaatttgagattactacgtcaagagaaaggcttgttggaggtagaatggcgattttgatgttgttgcttcttaatttcccattgacatctgatgaaaccgcttgacttcgagaaatttaaaagtttgaagatatcaaatgatctatctgatatccagtctcttgattgtgcaggttgctgtattcacaagatacacattacacaataccagtgactacatgctgcagtgcacagcttcacataaaaaatcactacctgtgtatgtaaatttgtgtactaggtaagcaatcttacatgattgctcataaaatgctgaaatcttgcaggttggaatctggaatgaacagtatcattcttcctccacaacatggttgtattttgccctcaatgtcaatgagctcctggtttataaagtaagcagtcacattagttttgttctctgctgattgaaaaaaatggttcttgattcaacacagcggagatagctattttgcacaaaatttcattaagcctctatatcttgtattgtagagtttgcttttgcaaatagtcaatctggtatggttatgaacactttgttcctcacctaagcctcagcaggtttgtttgctctagccctagcccaatgatagacttgcctgatcataacacagttatttcagtactatagattatgttagaaatatggccaattgcccacctgatgtggtatcataatcatatggctggtttaatggttcctgccagaaagttcttcataaacagcaacgtgcatcgtctgttccatgttacaacttacaagcacacattttttcttaacttttggtcttattcaaggtgaggaccatataattcatatctgttcctctacatggctgtttagcctgtttacacgctgtgtaaatgctacacaatggcttgtcgtgtttgtttaaccagccacttatcctgtttaatcgccgtttagtctgtttaaatggccatttagcctttataaacagctaaacgataggttactgtttagtccgtttaaacgtttacgctaacattttgtttgtgaaacattcttcattggctaagataattttgattgttgatgatatagaatataaagtcaggaaagtggttccattttcc

SEQ ID NO: 509 - DNA, 998 bp, Zea mays
agggagaaaattgtccgcattgtcgcgttaaagtcatatatgtaaacttgaaatttgaaagtaatacaagggcacaaagcatattaataggactaatttacttatgcttattgataaaaaggttgacacaattgaatattgtagtggttatactaaggaattgttgcccaaattagaggctgaacagtagagtacccttcttgtcttcttcagtagtagatatgatgtatgtcataaatctcaaaatcttcatgctcaagtctgatgaatagacaattatggaagctactaaacgacgtcaaataatatagttcaaccttctaatctaaggaaactatatgagaagcaaatcagacaatctatggtttatgttattatctttttcattgtttctcatttttgtttttatatgatttttcttgctgatatctctgttgttacaactttagaaaatatggagaaggtaccctttcttaaagtagtggtggagcaacgagaaatcaagatggtttagggtcaaacactcaaaccttcccccaaattgcactcattatattactctcatgcctaatacactttttatgtttctctcaaaacaatagtggatcccttcgcagagccaagcagttagaaggacataagtgaaatatttctatttcatcatttttaatgttttctattttcgacagttgtaagcacattgtttaaatctttaacagacattctcaatcattatattaagattgtgaatatgattgtcaaatatctgtctggaagtacaaacattcttccccagatttgttgcgttcaagtaattctgttgtctcactttatcgttacctactgtcgaaatattattcttaaaatttttgcatttgataacaacttcacaccctaactattaaattgttgttattgatagattctttgttggctttgagctctcttgattgttttatcccatcattttctatcttaaagaaaagtatttatgcaag

SEQ ID NO: 510 - DNA, 2692 bp, Zea mays
accggcgcaagttaagggaccggaaatgcactttactcaaaaaactatatatttggcttatggtttcatgctttagccctttttggatcttgtgtgataatttggttttggaaataatgtgttcgggtgtaacaaacctggtagatcctaaaaccattgtgttactaaaattttagtcatttgggagttttcgaaactgcactctagagcacatttatttaaattgtggtgttgcacttctcttggttctagaacaacaatttcttcataccaagatccctcaaaactacaacatccaaacatgcccttacattttttttcagtgctaataacatgacatttgttgtgtgttcattgcgctaactgcggtgttggtaactttttgtgctttagtgaggatttgtctatgttcttgggtccagcttgtttggttccgggtaatataaatttacgtgaaattggctattgggaatatctgagataacctctgcatcagtgagataacctgtcttttaacagggacttgttgtgcaatcattgtttctggtctcaaatttgaatagcacaataagataccttagagttatttgttttgttttcattctgttttagctagcatgttgcattatatctataccgaggaagatggtaactgtgttgttagcgataattgaaaatttaacattaagtttgttgcaatttcttatccccttgagtcatatgtgttggcaaactgttgtttatgtaatactgatgtattaccactgtttgatattttccattttgttctttcataggtgactttctccttactaagttccatttatttgcttcgttgttgaaataggttcgaatatggagtatggaatctgtgcataaggacaataccaacaatgattcgaagcaaaggttgcttgctacactgcgtgatcattttggatcagtgaactgtgtgagatgggccaagcatggccgctaccttgcttcaggatcagatgatcaggttatcctaattcacgagagaaaagctggctcaggtacatctgagtttggtagtggagaaccaccagatgcagagaactggaaggtcattatgaccttgagagggcatactgccgatgtggtaattatcttctaaaattccactgtgctgtgtttatgtttgtgataattattttgtaactatagaacaccttttccatttcttgtgcataaggtaggtagatcttagttggtcccctgatgattcaacgttggccagcggtagcttggataataccattcacatatggaacatgaacaacggcatttgcactgctgtcttgcgagggcacaccagcttagtgaaaggggttacctgggaccctattggttcctttattgcaagccaatcagatgataagactgttatgatatggcgtacaagtgactggagtcttgctcacaagacagaaggccattggacaaaatctgtatgtcgtatttttttatttctctgttagatctagctgtgatcaacctgtcttactgaatgcctttctcattttgtttgttcctgcagcttggttcaacattttttagacgacttgcttggtcaccttgtggccacttcataactaccactcatggtttccagaaacctaggcattcagcacctgtgcttgaaagaggcgagtgggctgcaacttttgactttctagggcataatgcgcctattgtggtagttaagtttaataactcaacgttccgtaagaatttctcaaatgaccaagacccaaaggctgcaccagttggatgggccaatggagcatcaaagacaccaacaaaagagcagcaaccatataatgttattgctattggaagtcaagatagaactattactgtttggacgacagcgagtgcccgtccactatttgttgctaggcattttttctctcaaagtgtggttgatttatcttggtatgagatgtcaattatttctctacaaccattattaacttgtatgctcaaactcatgttgatattgtttgtttcccttgcaggagccctgatggttattcactttttgcctgctccttggatggatcagctgcaaactttcactttgaagtgaaggagcttggacacaggttaagtgactctgaaatggatgaatggaagaggaacaggtatggtgatgttggaggacgacagtcaaatctagctgaaagccctgcacagttgctgctagagcaagcatcagcaaagcaatcagctggagaaaaggtgacttcaattgtcgagcaaggtaaagcacccccaaaagtttctgcaggtgtgcctaacccaggtcttgttgtgctaagtctcgaagttcctgaagtgtcacatgaagactctaagaagacagcaggtccaactgctgatgatgtaaaaaaaggcaaccagttatctagtccagtgaaacagagagaataccggcgccctgatggccggaaaagaataatcccagaggcagttggatttgcttccaaccaggataacatacccaaccattctcagaatcatcctgtgaatttttcatccctggatcaacgaatgaatggaacaaaaccatcttatggcagtaacagcaactctaataactgtggagttaaggatcgcactagtgtcacagcaagggcaaacataactgagagtcttgttattcaaa

SEQ ID NO: 511 - DNA, 582 bp, Zea mays
ggtgagccagtgtgattacatttgcggcctaactgtggccagtccagttacgctggagtcactagtatttaggtgacactatagaagcggccgcgacaacttgtccactatttctacctattaatctaaatgtgcagcaaatttagatttctgacgtcctttcagttgaccttgtttgcagttccattatgacaagttctcctgtcgtatactgttttcctttcgcttttgtatacccacggtattgatattgtttatcagtattttgtgtataggaatctcaacttctttgccgaggtttatcgacagttgtatttgttgggaaaagtagcagtttgactctatataatagagagtgccatggacggacctgagtctagtagaggtcgcagtaagcaggaggttgatgataatgttaatgcaaggaatacttggaaggaggagcaagaaaatcaggagaatgtggatagcagaaattattcggatatatccagaaaacatggatatgaacatgaaactgggcatcaggatgataatagaatgattacaccttcaaatgataggaatgaatcaaggaggaat

SEQ ID NO: 512 - DNA, 2639 bp, Zea mays; identical to SEQ ID NO: 507

SEQ ID NO: 513 - DNA, 1114 bp, Zea mays
attgaacagatatgaaccaaaaagaagaaagtagtcaccgcaactcatctgtgtcgagtggagatttcttcacgctcgtctcaggcgctcatgtcctgactctcgtcggcggccacaggtacaacttcattggtgacctagggtcatcacatagagacatgctagctgtctggtgggatgaatcaacatggatcgccatatccaaagctgctgcgaaggtcatcgtaggcgaaacactcggccttagcaaaggaccgtgccacggcgaaaaacggttagcaagggattcaggtttctcatgctccaaatgatcaatgatcttgttacaaattgtcaaagctaacccactttcagcattgttttctgcttccaataactcatttatggtaaagccttgttgtaaggctaacttagtgagaacaggtgtagagggaacaacagtgccatcatccagatcagactccgcatcagaaacagctgagtgatcccagaaacgacctctcagtgcggtctcaatcccatgaacatgcggttaagattttttggtcgactcataaacgatctccctttctttatgatagcactcgaaatccatgagtctatgtctatccacgtccgatctcaatttagaatctgagacaatgtctacagagctcgaccttgtgggcggtgccaacttgtttcgcataatgaagaaccaaggaccagaagaagaagaagaagggggagaaagacagaagagatatctggagccaaatacttacgccgcatgaaggaggtgacgccttgatcttaataaagatcctaactggcagtgaacagaagacgtcggaaccaagtcttccaaatatgcatcagttcaacctgaagtaaccagagatgaagaagaggaagccgatgaaaacacatcacacgtttacgaactggtatctaccctcagccatccgatgacatcccaacggtctggatctatttgagtgaaaggggtaccttgcatcaaatatgagcccacaaactgacgatcaatggttcacattggatgaaccctagatctattcccatccgcacaaccccgatcagacgttcacgaggtcgtcttctttcccatgctcgg

SEQ ID NO: 514 - DNA, 869 bp, Zea mays
tgatagagcagcggctgtcaatggcggcagctgggtctctctctcttaccagggatctcccgatttccccctgctctcagtattgcttcatggcgtctttgagtccgcaatcggctggacgagaggaggttcacggtcaccaatttatagcgaccatagatcatggtctcgtgagaggggaactcggccaactggggtgcggttgttacaacaaccagcgacattcacggggaggaagacgcttctggtgcaaggggcccaccaagaagccactgcgcgcgcgcccggctaagtaattgtgaggctgaccccgcggccccacaagatcagtgacacgcagaaaaaaaggagaggggaaaatgatgggcctccacgggaaaaaaacaagggtttaatgggccgctcgagctgcgagtggagaaaagaagatgggccggccgaagcaaatcagcataaacgcaagtatgatctttccttttgttttttctatttgctatccaatttcaaaattgagttcaaatctgcatttgagattttaactttaggtttttaatgcacaaacaaaaacaccagtataaaattcgccaaattattaatctaagtattggttgacatatgcaatacacaaataattttgaatgtgaaaagtttaatttagaaattcaaaaatattcattatattttttgtgaaaagtaaggttcaatatagagaattactttaggttggatatattctttacaagtattttatctatatagtttattccaaagtacttctagtcttacgatgattatattctcccatcttttcttagaatgagatgaattttctctagatcccaaaaacatggttttggggtgttacaatt

SEQ ID NO: 515 - DNA, 659 bp, Zea mays
attcacgaggccatcctccacacctatttttttcggttcggtcttttttttttgcgatttgcagccctattattcttcctgacgtgttgtcggcccttcaatgtgatgtttcatatataaactcaaggattagattcggatgtgcactttttctagggcggctattattaggttggagattctgtagttccttgcatcggagctgaacatttttgtggatactagatttgcgtttgcttgttttgaaattgtggtctatgtttaactctgattgcttggtagattttttgggcttgcaacattgtgcgcctattgttgtttagctgggctttatgaatggttagtggctttgcgtttgttctggttatatttttagttattcatatagatttccagaactagggtttgttaggggataaaacagtggtaatttttgtttgaattttgctgtggaacttgagataatttcaccctaccaaacaggcactatagatggacccttaactagagatgatcagtttaactatagatggaccctaccaaactagccaagttacttaacttgacatgagaagtttaattcggtgagccaccctgtttggtaggcactataaacactcttaaaatatgcattagaaaggtggataattcgataatca

SEQ ID NO: 516 - DNA, 586 bp, Zea mays
aacataagaagtgtagttaggcatgcgagtaatataatgagtgcaatttggggaatgtttgagtgtttgactcaaaccatcttgatttctcgttgctccaccactactttcagaaagggtaccttctccatattttataaagttgtaacaacagagatatcagcaagaaaaatcatataaaaacaaaaatgagaaacaatgaaaaagataataacataaaccatagattgtctgatttgcttctcgtatagtttccttagattagaaggttggaccatattatttgacgtggtttagtagctttcataattgtccattcatcatagacttgagcatgaagattttgagatttatgagattcatcatatctactactgaagaagacaaaaagggtactctacagtttcagcttctaatttgggcaacaatttcttagtataatcactacaatattcaattgtgtcaacctttttatcaataagaataagtaaattagtcatattaatatgctttgtgcccttgtattactttcagtttcaagtttacatatatgactttaacgcgacagcgcggacaattttctccg

SEQ ID NO: 517 - DNA, 1614 bp, Zea mays
ccaagtccccaatgaccagctttttctgctgtaatacacgcatgttccattacaagctttagaagcacatttctatcttcatttgatttaaagtaacatgggtcaaatcctgcgtagctagctgttctagatttagccctcttattgatcatctgttctagcttgttcactgttcttgttgggaatgtaacctcagtaacagggaatgaaagatgctttcttttggtccatataccgaaagtagttcctagtaccctttttgattggcttttgcttgctccatgagtgagtcattctggtgctatttcttttgcctaatttttttaatcattgttatgatgttaggtactctttttagcattttttcttcacctcggtcgaaagtgttactcggagctcttaattgatataatcatgtgcaggtctccaagacttagtatcctttcggtcaaaactagcccggcagtaaccgatcgatcaatgcttattgtcggagcatgctgccccatgctcacagaactggacatcagcaactgctacgagatttcatacaagtcactcgaggtgatcggccaaagctgccagaacctcagggtcctcaagcgcaacgtcttcaactggatcgacccatcggagcatgccggagtagttcctgaggactatctgagagaatgccccgaagacggcaacagggaagccattacgatatccaggttcatgccgaagctgagacacctcgagctgaggttctcgaagctgaccgccgtcgccctcggctccatccctgaaggatgcaaggacctggaggtcctggacctgttcggctgcgcgaaccttacgagccggggaatagaccaggccgctgctagtctgaagagtctggtgacgctggtgaagcccaacttctacatacctcgctcctccttccacatggggaggtacggccactggcagctctacgacgagaggttccagaccaatgtgtttcagatatgatcatagtctcaggtcaggtactcaggtgctccctttgacctatggtttatattctgtgtatgtgggcgcatatagtggcaccaataacgtgtggtttgaatcgtttctctcgacaacattttgtacagatggttatgctccagcggtttgtggagtgtggttggttttaatataaatgacttattgcctgcaaaagagatgttttgttttggctctctactttggttccaagaacgtgacataacatggttggcttattcgatcctgattgcaaggcatctttggtgcctggccctgggtgtcgtcttcctggccccatgttgcacttgcgcccgaccgtgaccgctcgctcgatggcgttaccagaatgccagccatgttcgtgtcatccgcaccgaaatccgatgcgttgtcgacttgtcgcgcatcacctttcgggcagctgcctgactgtctgcatcttttttttcccagcagcagagatgaggctatacagagtggctccaattatatctaatccccagaagtatttcctctagcttctgccaagggcagagctgagttgagacatggaaattgcacgcatgccttcctcgaaaaggctgaaaccttcccttt

SEQ ID NO: 518 - DNA, 1162 bp, Zea mays
agaccagctttaccttccctttcgttcaacgacatcacactgtccttttcaaggttaacatatgcgtaacatacatgtggttgatctgcatttacagttcgtgaaaactacatatcagaaagagaaaaaaatagtggacaatgtatcccatccctccgtttgtaccagtcggtgactgacaagagatggaaatccagttggctggcttgatcctacactgtggttgagatctggcaagcaaaggccaatggtccatggagacggagcagcaaaaggccaccgaatccgcacattgctggttccatatgtctctcttttgcctagcagcacatcactagaacccaaagagagagaaaaacacaagtgccagaatcagcaacctctgctgggatttaggtcccattattaggcctggactgtccctaattttgtttctaaacgctatataatccaacgatgtgtaaaacaagaacagatgaacagctccattcacgtggtttcctgatctttttcagattgtttgccgtcgagagagagagagagagaaaaggtcataatggaatcaggtgccgtcttgccaaataaggtgcttgccttatcttggcacagcagtcagcaggatttataagaagagtctccggggagactccacgtccgagactcagacctgtgaactgcttctggtggcctgtccatcccaagatgaagagaggcaacaccgtcctcgccacctccatctccgtcttggtcctcctatcccttgcctcccaggtctcacggtgtgcagcagcagcagcatccgagggaagcgccggaggagtctccacggagcggcggcgggtcaggccttatctccaggtgcaagaacaattggatggtatggtcagcattgctctcttttttttttcttttctcttaattggtgcctgaaatattgccgtgtcgccatgcatgattgcacaacttatcctacggagaataactcgtctgcgacaaactgattggcttgttcgtgaactgaaggcgacatgaaagaccacctggaaaccgggagtcctagccggaggcttgggcctgggcatgaggcggcgggcacagtggagctggagcatcatcacaggaggattaccaccgggcacaagggtggcagcgcgggtggagt

SEQ ID NO: 519 - DNA, 803 bp, Zea mays
cttaaaatatgaggccttaatctcaaaatttgtactttctgtctgagggtcgttaacaaaattttcagggcaatcaataaaatatgtgtcattgaacgggtcaccgccaacgcctacacaagttgaccgccccaaatgtacagttgccgtctgaaacacctatcaacaaaagtcagacatgcattaaccaaacaattacccgattaggttcgcacatacacaaaaggtcatgtcaggcataccgcttcatatgtcaaggtaccagaacgagatatgatcccaatatgcccatgcttgtggacgtaacctggaacgattccaattttacactcaccaggcttaatgataacatgacaatttggcccaatcaattgagttttagactgactgtttactgcagctttcactttcacctaaatttgcagacgaaacattatgttgtcacctcatggagttccatcaacacagcaaaatataactaactgatctatgacatgagtcaatagcaatatacagaaaaaggaatgtccacaagcaagccgctcaatgaaccatggtagtaaaattgtgtctaattggatcacctacatctaattttcaaaatttgagccccatcctgcacaagagactaatagccgactgcatgcctatatgtgcaagataaactacgatgagcagtaaccatatgggcaacgcacggtatggacctagtgtgtgtatatatatccattgtggctttgagggtacggtacgatatttttatacttgggagaaaaatctatcgggttgagaatcaaacttgc

SEQ ID NO: 520 - DNA, 517 bp, Zea mays
aaagagtttgaagaaatcgatcaaagtccgatttgaaatatgttatgatagcctaccattgacaagacgaagaaactacggaaaaatagttttaactgccagataaggggactacgagccatatagatatctcagaaaatcgattgattttgttgcatcgaagtaaaatgttatttttgccataaaatttattaggagaaaataaaatttattagcagcgtctgtatcgtaggcgtagccagatcggatccatatcacgttcaagctgatccgtctagaaaggtaggcagtaatatggagtctgttgctgcgtgcgtctattgaaagaagtaaccagatattatctcgcctggtagtccagcgaacggactcgagtctgttgctgccgctgcggggatcggagtccagttcccgcgtaatttcgcgcacgcaacaactctcatccctcacctatttaaacctacgcccacaaccgcaagccccagcagagcacaccgcctcgacgttctgcgagcga

SEQ ID NO: 521 - DNA, 1103 bp, Zea mays
cgattaaaactcttcttagtcaaaattaaatagaaaataatttaatactcctcgatctccaacccaacacagccattggtagccaggatcaactctaacgcacacatccacgaaacccgcgcacatctcaacgaagagaagcgttttttttattcctgtttaatgcaatgtaataacaagtcttatgtacagttgcaggctacaggcctactcccactgaaaagaatcgccaccgaaccatcacgactctgccaccgccagcgccacagccaccacgttctgcccggcatccagttcttctgacaccgcgttctggtcgatgaagttgaacagcgcgagccccgcggcccacacgtcgttgtccatcaccgactcctccggcgagtggctgatgccgccgcggcaccgcacgaacagcatcccgatctgcgaccacacaatccggagcgtgagcgagctgagcttcactattcagcacactagtcaccgccaacctcacattcgttcgcacgcatgcttcgtcttcttaccttggtgagcctggccatcgccatcgcgtcgtgccctgcgccgctcatcagcacgggcgtctcgccggccgccacggtgcgccccggcattgccgacacggtcgaccgcgccgcgcgcttcagctgagacgttaactccgggtcgcagtgcgtcgctgccgccgagtgctggtgcaagcgacatcaaggtcagactcagttcggcagcacaaactctacaccggcagatatcatgagccatgacaccaagagtgctgattcggtgctcctcctcaccttatgctcgaccttgcaatcgaccagtctgtcatcgcatttctggagaacaagcctcgagaagctcgtcacgatcgtctccctcacttggtcgtccatcgcgcggatgtccaccgtgaagtttacctgtcgtgggcacagctccaaggttcagctgactgatctgagccaccagttcatcagcagggccaagaagagtagtgcttggcaagcttacctggcccggaatcacgttgctcgcgcttggccacgtgttcagctcgccgacggtgcacaccaggccggccagggactcct

SEQ ID NO: 522 - DNA, 2252 bp, Zea mays
acagaggcgttccagagtcacaacgagctctgcagctgcaaccatcggatcacggcgcaatttcattggaactgtgccagcatgcccttgcgaaccatctactattacctaggcaaacaaaaacaaagactaagcgctgtaactactttccttctcactcgaaagcttggtatacaaagggacttggaagcaacccagaattattaatgacagttgtcgtgggcagcttgagtatttaaatgtcaatgttaaactgaacaatcttggtgacagcaatgcctgtcttcctgaacattaattaactaagacttgttcttgcatcaaagatgacacatgacataggtgtgccaattattgaatgagatggatgttgactaataccccaggtgtttctctgattgattgtttatccattacatgcacatacttggttaacttaatattgaccactcataccctttgctaagagaacactcctatctagaattatttgattgcttacctgttgactgctatactgtcaccttatggttatctaatataaccggtacttcttttttctcagacacatatagtaggctctgatattgattgttttataaggaaagaatgaccttacggtaggaagccatgcagctagaccatattttagttttgtaaatgtagttcttgaatagatttcacaagaatagcagagaactccgatgcaccttcaatcgtgtctgtcctgcaattccttttacaacaccaagtggataatgaagggcttccaggacagggccttgctccatgtgtacctacagtttttaaaaatatatatatgtgatgtattctgtattaccaggcaactacatgaaaaaaggcatacgaaggcttcatacctcaacataactccccacagactccgggttgtacctggcttgactaatagcagtagaggtagcctcaaaagaattcattttcagaacatcttgtagtgtagtgccactgatgaaactcaatacaacaaatgaactgcatcagagacagttctgtaaaatagttcggttggttcacgcgaaaaagacaacacctcttatctgatacttgtaaaattgattcaggtagtgtaccagctacagcagcgcttcccagaaaagttgtctggaatctgatgccctcctcatcgctgaatgcaatgacctaagcttcaaaaaggaaaaatgagtgctaggctccgccatgatgatttttccaggtgacgataatgcaatctaactaatgctgattcataatttgataaaaaaaataatcttcaagccactttggattagagcgttgaagccatacagtgaagaataaaccatgatttggttcacaccaaaacatgccgaccttgatctatagatgatatctagacatttgtttactgaaatgcatgacacaacctgacaacttgtgcattttgattatcaggattgccagaataacaaaagatgaaccgtgcacagaatcttttcaagatctgtaggaggtacgtcgaactgattaaaggggcattataaaactagattcctccaggtttctatagtctttcctgattatattatgatagtaataaagaacctactaggtaccttgcagcttagctatccaatcagcatcaaaagtacaatatataattaaaactgagtaaaatataataactctatgcctgctactggcaataaaacaatgtgaaatattccaatcaaacaaataaaagagtagatggacacaaacaagatcaatgcagacaagtgcgggtctacaagacgtatgtggctcataacgccacttgtagagagcgagaatagtataaggccattcacaagttgcggtggagcaaagaaacacatttaacatatgatactatagtaacatctttagtatactggaagcagtagagaattctctaacctccactggtctcgttaacctctggagtttccccgtaactttcaaaaccttcagtgctgagattgctgaaataatacccaaggctccatcgtacatcccagcatcaacgacagtgtcctgttttttgaacaaggaaaatcgtatcagttgtcgcaatattggatcgccatcaaaacactgaaataaccggatagaggaagatagactcaccatatgagatccaatcaacaaggcatctctggtagaatttgccggctcatatcgaccatgaatattccccatctgatcgacccaccttcacgttgagcagagac

SEQ ID NO: 523 - DNA, 3013 bp, Zea mays
gattgtctcgtgggctcggagatgtgtataagagaaagtctcaatgccacgctcaacacgatccaatgttccttccagcccgtcgccgtcagccttgaacaattgcatgtccgcgagattgagaacggctgcgcacggagcgtcggaatcattttgactcagtttgcgcggcagtgagtaagacctgagccgatcctgcgcggcttcgatttcctccaccgatacaagatccgcccacgtctcaactttcggccttacgcgattcagcttgttccatacgccgccgctggggtttgtcgtcacaccccagtcgaacgagaccttttctggatcctggcctttagcgcggatgaagttgcagaagtcctcatagccccacgcaacctcgctactgatggtgtacgaatcggtcagtggtcccgtgccagatgtggacacaacctcgttcgcagctttcttcctcagccgatcctctagcgctcccaagtgtgacccgccttgagcttttcgcgcatggtcttgaccattgagatgctggcatgatgcccaacggacttgagcgcttcggctatgacggtagggccaatagctagattctcgaccgcctcacgtagcgcttgcttatcgtcatcatcgagcgtggcgtaaatcttttccagcgcgcatagtgtgcggattggctcggcttgctttgcgagtgctgcttttaggctcatggtgtccctctcatgaaaaaggccgccctagttggacggcgcttttggtttatctaaagaatccagttgatattcggaaccgtggtgattccacaacttccgcaatatgcgatcaatgagcaatcaggtctagggtcatcgtcgccgtgatagtcatcatgcgagtaccacggattcatgcagtcccagcagcgtctagtaacgcccatcttcttgatctgccgatgctcgaagttgctcttggattgattgcagtcccagcacatgctcaccaggttgtctgacctatcggagatgaccggaacatcttcagcgaggaatgctgagcgcgggatgatgtgatcaacagcgaaccgcgcatgactcccacagtctcggcaaaactcaccgtcgcgctggtggatgattgcgcgcttcaccgagtcaatcggctctcgtagctcacgattccgaaccggccagcgcttcggagggtcaagcttcaggtcaagctcaccgaagaattgcacgtagtcaacgtcttggcggactctcgatgcgtcgtagtaagcggttatgtcttggatttcagcaatgagtggcatattccctacattccaaatctggctgcttgaccctcgcgggccatactgttgacggatgcgaagtgcggacggaacaccattcgcagattcgcctcttggccgtggcggttcttgcccacgatgaactcgatttccgattccttgtctgacgttcggtgaagcaagatgatgttgtccgcgaatgcctcgatgccgccagactctctaaggtctgacacaaccggcctcgcgtccgtcctgctcgccgaattcctgttgacttgagcaagtgccaacacatggatattgaagtccttagcgagcgccttgcagtctccagcaatgcgcgacacttgccgctcgcgtgcctctgatcggtcggcgggttcgacaagttggagatagtcgatgatgactaacttcaaatcgccctgccgcttccacgtccttacggcggcgcgaatcttggacatgctcatggtcgagttgtcttcgatgtacatgggccagcgcgatgacttctcacttagagcttcgagccgttgcagatcctcactcgtgagtcgtgaggttgtgaagtgctccaacatcactccctgagatgccgcagccattcgcgccacaacctcttcttcgcgcatctccagactgaagaagcccacaccgtgctcggcggcagctacggccgcgcaaccggcaacgagtgacttgcccacagccggtcgagcgcccaccacggttagctgtccaggtttccatccaccgttgagcgtgtgatcaagttcaggccagccggtgttgattccttgtggccgtggatttgtccacacgtctagcgatgacttcagcgcgtccgagaatgtgcgcacgcgaactccgccagtctttgatgcagctcggtcgagttcggagcgagcgttatctaggacttgttcggcggattcccattgcgccgtctcagatgcattggtgagtactccagcaacgtctccgatgcgtcgtaggctcgctagtcctttgacgatttctgcatagtgtggagccgctgcaaccgaggtgatcattccaaggcattggtgaaggtagtcggacttgatgccaccgatgccgtcaccgacaagctggttgctaatcgtgatcgggttgaccggcttgttattgcgccgctcttgggtgaatagcttccagagttgttcgtgggctggctgaaagaagtcatccggattcacggtgagttcatcgagcacacgttcatcgagtagcaccgagccgatcagcgcccgttctgcgtcaagatcaaacctctgttgcattctggcctccgatctttgctagtgcgagttggtagcgctcttcattgtgtttgcgtcgagactctttcatccatgcgacttcttcatggagtgggagaccttcgggtggattcggtttcgtccagtagtccacgccaagaatgctgtccacatcgagttccccagcttcagttccgggggttggcttccatccatccttttcgcgccactgttgctttttgagcatgtcgttcttccatgtggcttcccagttgattttcttgttgccgttctcgcgccagtagagagcgaactctgttgatgcggtgtggacgttgacggctggtgttgtcttagccgcccagatcttcatttcgggagtaatgagaaatggagttgggatcgagtggggttggcttggtactggtgtcgccctctcttc

SEQ ID NO: 524 - DNA, 2534 bp, Zea mays
tactggtctggtaatgcgtgcatcacaaatacaacaaatcaagcgctctctataggcaggtttatatttcgatgtttggactagagtttcaaaaagtcgtgaccgaattgactagagttccaaaaattaggttgatgttccataataaaagaacattacaaatgccactacataccatctaagataattgtccaaacaagtaaaatttacaaacaagaaataaaaatgtgtaataaaaattgaaatcataattttccttccatttagtgtttaccaagaaatgttattggtaaaattgtgacaaaaaactaatgaaaaatcattaataacgggtaacaatcaaagatagataataaaaatataacttattcataaaaaattaatgatatgaaaattgacgattaaagccaccttatttttcatatgaaatttttttaatatttacaaagaaatgttatttgaataactgtgacaaaaaacaaatgaaaaactattaatttttgctaatgatcaaagtcagatactagaaatataacttgtgccttcagaaattaataatcaaagtcacctcattattcatatgaaatattctagtgatagtacatgacaatccaattctacgggtcacatactcattttattattgttttgaacttgtgttaatgatgaagcatgcaaaacaacaagttagatcgatttgtaaaaactatcggtgtaaacaatacatcatttagtgcttcaaaatgatttaaagttaggatatgtctaaaatctttatattctgcaacaaacttgaaaacaattaatattcattagtcccataattttttatgctttgtataaaacgtacattaaataaacaatatttaatcttatgattatgtttgtttaaagtggattaaaagcttacttttttataataaataaacatttcaaatactagtatatacattccgacataacagaactaaacaagcatgatttacaatctgataataaacaaaatttaatgaaaattgggatcaaattttactttatgttaatatttttcgataaatattattggtatagttttgacaaaacattaaaaaaactattaatgttaaataaagatcttattaataaagtcgaaatataaatcgcaccgttagaaaattactgatctagtaaaatccaaaagttggctttaaaaaattttaaattaactcgttcttcatgatcattcagttataaaatatgggattctatttgtttatattattgactttgtcttcaacatttatattacttatgttagccttagtatacatccatttcaattttagatcttccttcaacatttttgttgcttatgctagacttaatataaatcaatttcatttttattttttgtttagcactatttcaacattttttgcccaatatgtgtgtggtggaagtttgttatgttgtatatcatggcaactggtcgggtgacacctcttatatagttacacgtgagcatgggtgaaagacacatgtccccattctagagatgtctccacaaatatctatagagttccacattgcaacaaatattaggctttatagtttgtcaagattgttgtagaagattatagaaggttgcatttaccatggttagccatggttgtttatagaaggttcaagaatgttgcatgtaattgctcgaatcaactatttaataaattaattggcataacaatcattataagaaaataattaaatcttatggactctatgaatgataatgtttaatcctcatcttgatcattttgctcatcaaaatgtttctttcgattaccttggcatttgtaggaaaccttggttccacatccatcacttttgcaatttatattccaatattaatggtacaactcaaaccttcatatatatacttcttaaaatacgagatgacccctttaatctattcaagtgaagcatttatggacataatctgatatagcaatttttactaactatatttatcgaaaataaattttttggtccacctgatggtttgggccctaggtagtcgcccctctcgtctaggtctagagtcggtcctatgttaaaaagttctttatggcaataaaaaggcatcatggttcatcacgattgttggtctccacaatatctaggtgacttcttcatggcaaaaatatctaggcttcatggtttgtcatgattgctatagaaaattatagaagggtacatagatcatggttagccacagttgtttgtagaaggttctagaaagtttcatgtatcatggttagccatgattgtttgtagaaggttctagaaggttgcatattggtcacctatcaaagctcctatgagaaaccataacacgacaacacaattaaattaaaaacactttctccccttgtccactcatgaaaaaagtgggaaacatgggaagaaggttacagaagtacgaatgtcgagagaggcaaaatgtgtaagtggaagagtcatgaaccatgttcaccatctgttatactaccttgatg

SEQ ID NO: 525 - DNA, 3183 bp, Zea mays
tacatgttgcgctttaaacatttataaagttacctcgttttgcatatgtccaaactcaagcgccagcattcatacatcaaatatgttgggcttcaaattcatgcgatagatagtcttgaacttgggttcatgatgaagcatatgaaacaaatgttgtatagagttgggtctacctgtaaaaattgtctgtctaaacaatacaatatttagggcttcaaaatgcttcgaagttgatgcataacaaaaatcaatatattatgcaaaaaacttgcatgttttgaagtaatatgcctcaagttattatttttgttgaactttggttgatagtggagagtgtgaaacaacatgttggatcatttctatataagtaccgattaaaaagtacatattttagggcttcgatacgcttcaaagtagtcacatgcttcattctacaatattctagagataacatgcacgaaatcatgatcctttactcccatactattttttcgagtggcttcaaatgtaggttgatgtgtccataataaagaaatagtacaatgtccactgcaaaccttctaacataacgggactaaactagcatggtttacaatccaagaatgtgcttagtgtaatgaaagttggggtcaaattttccttcatattaatgtttttgataaataaatgttattagtataattctgacaaaatattaatgaaaacctttaattttggatacagatcatagtcacatagtagaattacaacttgcttttgtagaaaacacataatctagaaaagtctacatgttagctttatacatttataaatttacatcgttcttcaaaactattttgtttcttcaaaacggtcgcatgttgtgggttgtcttgtacttacattgataatggagcgtgtgaaaaaacatgttggattctttttgtaaaaactacgattctaaacattacaccatttatggctaaacattacatcatttaggcttcgaaccgctttaaacttacgttgatctccataaccatgaaacatttgaaaaacactacaatattataagataacatgcccaaacaagtattgtttatgatttggcaatgagtaaattataacataattttccatggtttaattgttttgtgataaatatcctgactcccatgctcgtttttggagtgacctcaaaacatgcatttttgtccttaaccaagaaacattgaaaacaacatgcctaaaccagtattgtttatgttctgtcaatgagcaaattgtaattaaaattggaataaaatgttttatatttaattctatagtaatcaatatcattgatagaaccataatagaatagtaacaaagaatcttaaaacatggatggaaatgaaagtcgaatagcataaatatagctctcaactccagaaaattaccaatccaaataatataaatgttgtgctttaaacatttctaaagttacctcgttctacatatgtccaaactcaagtgccaccattcatacatccaatatgttgggcccgaaactcatggtatagatcatcttgaacttgggttgataaagcatgtgaaacaaatgttggatacggttgggtctatctgtaaaaactgttagtctaaacaatacaacatttagggcttcaaatgatccaaaattgatgcacatcagaaatcgatatattatgcaaaaaatttgcattaaattaatacccattagtctcatactcatgttttgagcggtctcaaacatgggttgatgtgtagataaccaagaaacattgcaaatagcactacatatgttttgaagtaatattcctcatgttattaattgtgttgaactttggttgatatggagcatgtgaaacaacatgtttgatcattctgtaaaaactatcgattaaaattatatattttattgattcgaaacactacaaagtagtcacatacttcataccacagtattctagagaaaacatgcatgaaatcaagatcctttattctatactatttttctagtgtcttgaaacataggtggatgtgtccctaatcaagaaacattacaatatccattgcataccttcggacattacgtgactaacctagcatgttttacaatccagcaatatgcaaagtgtaataaatgtatggatcaaattttacttcatcttaatgttttttataaataaatgttattagtataattgtgaaaaaatagtaatggaacctttagatttggataaagatcatagtcagatagtagaattacagctcacgtttgtagagaacccatgatctagaaaagtctacatgttggctttaaacatttataaatttacctcggtcttcaaaccatcaaattctaaggttcacatacagtgggttgtcttgtacttatattgataatggagtgtgtgaaacaacatgttggatccttcttgtaaaaactacgattctaaatattacatcatctagggctttgaaccgcttcaaacatacaatgatgtccataaccataatacatttttcttaacaatacacatcttatgaaataacatgcccaaaaaagtatgatttacagtttggcagcaagaaaattgtaatataattttccttggtttaatttataaatgtttttttgagtcccatactcgtttttttgagtggcctcaaaacatgcattgttgttcttaaccaaggagcatttaaaatagcactacatatgttttaagatagaatgtctaaactagtattgtttatggtcgaacaataagcaaattgtaattaaaattggaatgaaatttttctatatttaattcctttgttataaacatcattgatacaaccataatagaatagtaacaaagaatcttagaacatggatggaatgaagagtcgaaagcataaatatagctctcaactccgaaaaataaccgatctaaaaaaatacatgttgcgcattaagcatttctaaagtttcctcattcttgatatgtccaaactcaggtgccattattcatacatccatattctacagatttccttgaacttgggttgatgatgaagcatatgaaataaatgtcggatagagttgggtctatctgtaaaaactatccgtctaaataatacaacaattaaggcttcaaaatgcttcgaagttgatgcacatcagaaatctatata

SEQ ID NO: 526 - DNA, 625 bp, Zea mays
gtctattttcgtatttgcggaaaattggaaacgagacacaaatgggagagggtctattctgtttgtttttacgggatctcattgttatccggattgaacccatatttatcatgttttaagaaatctaggatgagcccaatatacattagtgcataaactaaagcctcatatccttaagtaaaaaaattataacacaagcgatcattctagccactagctctccttaatgacaagtggcctaaattctcaaacaacattgaccgtagctattattacaccactagcaagcaaacaataacggaatgttgtctctatgtatctgtttattttatgttattgcactgcttatcagtcaccaatcaggtatcaatatcatgtgtgcttgtattaaattacgagtttccacttaatattttcgttttcgtacactcgtttacctcgctctcgtttacgttccctactcttttggacccagtcccgtttttggtgataaaatacagaaacagaaacatgaaagatgtttttccatctgtttttatcattacatggcatcatgtggtaaggtggggaagatcaaaagatatagcttggctatgatggaccgagttgctagtgtgaaggacaa

SEQ ID NO: 527 - DNA, 2902 bp, Zea mays
agctaacccacattaattgcgttgcgctcactgcccgctttccagtcgggaaacctgtcgtgccagctgcattaatgaatcggccaacgcgcggggagaggcggtttgcgtattgggcgctcttccgcttcctcgctcactgactcgctgcgctcggtcgttcggctgcggcgagcggtatcagctcactcaaaggcggtaatacggttatccacagaatcaggggataacgcaggaaagaacatgtgagcaaaaggccagcaaaaggccaggaaccgtaaaaaggccgcgttgctggcgtttttccataggctccgcccccctgacgagcatcacaaaaatcgacgctcaagtcagaggtggcgaaacccgacaggactataaagataccaggcgtttccccctggaagctccctcgtgcgctctcctgttccgaccctgccgcttaccggatacctgtccgcctttctcccttcgggaagcgtggcgctttctcatagctcacgctgtaggtatctcagttcggtgtaggtcgttcgctccaagctgggctgtgtgcacgaaccccccgttcagcccgaccgctgcgccttatccagtaactatcgtcttgagtccaacccggtaagacacgacttatcgccactggcagcagccactggtaacaggattagcagagcgaggtatgtaggcggtgctacagagttcttgaagtggtggcctaactacggctacactagaagaacagtatttggtatctgcgctctgctgaagccagttaccttcggaaaaagagttggtagctcttgatccggcaaacaaaccaccgctggtagcggtggtttttttgtttgcaagcagcagattacgcgcagaaaaaaaggatctcaagaagatcctttgatcttttctaccagcacagacgtcggattcacctttatgttgataagaaataaaagaaaatgccaataggatatcggcattttcttttgcgtttttatttgttaactgttaattgtccttgttcaaggatgctgtctttgacaacagatgttttcttgcctttgatgttcagcaggaaacttggcgcaaacgttgattgtttgtctgcgtagaatcctctgtttgtcatatagcttgtaatcacgacattgtttcctttcgcttgaggtacagcgaagtgtgagtaagtaaaggttacatcgttaggatcaagatccatttttaacacaaggccagttttgttcagcggcttgtatgggccagttaaagaattagaaacataaccaagcatgtaaatatcgttagacgtaatgccgtcaatcgtcatttttgatccgcgggagtcagtgaacaggtaccatttgccgttcattttaaagacgttcgcgcgttcaatttcatctgttactgtgttagatgcaatcagcggtttcatcacttttttcagtgtgtaatcatcgtttagctcaatcataccgagagcgccgtttgctaactcagccgtgcgttttttatcgctttgcagaagtttttgactttcttgacggaagaatgatgtgcttttgccatagtatgctttgttaaataaagattcttcgccttggtagccatcttcagttccagtgtttgcttcaaatactaagtatttgtggcctttatcttctacgtagtgaggatctctcagcgtatggttgtcgcctgagctgtagttgccttcatcgatgaactgctgtacattttgatacgtttttccgtcaccgtcaaagattgatttataatcctctacaccgttgatgttcaaagagctgtctgatgctgatacgttaacttgtgcagttgtcagtgtttgtttgccgtaatgtttaccggagaaatcagtgtagaataaacggatttttccgtcagatgtaaatgtggctgaacctgaccattcttgtgtttggtcttttaggatagaatcatttgcatcgaatttgtcgctgtctttaaagacgcggccagcgtttttccagctgtcaatagaagtttcgccgactttttgatagaacatgtaaatcgatgtgtcatccgcatttttaggatctccggctaatgcaaagacgatgtggtagccgtgatagtttgcgacagtgccgtcagcgttttgtaatggccagctgtcccaaacgtccaggccttttgcagaagagatatttttaattgtggacgaatcgaactcaggaacttgatatttttcatttttttgctgttcagggatttgcagcatatcatggcgtgtaatatgggaaatgccgtatgtttccttatatggcttttggttcgtttctttcgcaaacgcttgagttgcgcctcctgccagcagtgcggtagtaaaggttaatactgttgcttgttttgcaaactttttgatgttcatcgttcatgtctccttttttatgtactgtgttagcggtctgcttcttccagccctcctgtttgaagatggcaagttagttacgcacaataaaaaaagacctaaaatatgtaaggggtgacgccaaagtatacactttgccctttacacattttaggtcttgcctgctttatcagtaacaaacccgcgcgatttacttttcgacctcattctattagactctcgtttggattgcaactggtctattttcctcttttgtttgatagaaaatcataaaaggatttgcagactacgggcctaaagaactaaaaaatctatctgtttcttttcattctctgtattttttatagtttctgttgcatgggcataaagttgcctttttaatcacaattcagaaaatatcataatatctcatttcactaaataatagtgaacggcaggtatatgtgatgggttaaaatgcatccaccacagtgggatccgaag

SEQ ID NO: 528 - DNA, 28218 bp, Zea mays
gattaaaacgaaaggcccagtctttcgactgagcctttcgttttatttgaccatgttggtatgatttaaattaatacgactcactatagggtcagtgcggccgcgacttcaagtcacagcgatccctccccgtccgttttttttagcgccgattggagcgagtatggcaaacccaaagcgagcatcgctccgagcagtcaaggacggcgagcaggtagcggctccgaagcctattacttccgtgttggaagctgccgagaatggcaccgtgctggatgagttggagcaaatgcgccgcgttgcgtcgaggcgtattgatgacccgaacacaaacccaacagccctcgccgctctaatgcgtcgtcaaattgagatctctcgggaaatagagacgctaaaacgtcaaaagtccgaggaggccgaatctattggcgcaaccgaagactcggagtggtcagaagaagctatctgaggtagctcgccatatctgccgccccactggaatagtgtccacgggctggccggctgtcaaagagcgcgccgaaaagatgggtatgccctctgatgcatggcaggacggcattggtcgcctagccttagcgaagcgtgactctggactctacgccgctggaattggcggcgtcatcctctcaatccctcgccaggtcggtaagacctacctcatttcgcttatcgtgttctccctgtgctcactcttcccgaatctcacggtgatctggactgcgcatagaacgcgaacgcacaatgagacattcaagaagatgcagtccactgccaagaagccgaaagttgcgccttggattgagaatgtccgcgccactaacggcgagcaggaaataacattcgtcaacggctcgcgaatcctcttcggtgctcgcgaatccggctttggtcgcggcttcgacgaggttgacatccttgttctagatgaggctcagatcctctctgaggacgccatgacggatatggttccggcgacgaacgcggcacccaatggcctagttttcatgatggggacgccgccacgcccacgcgataatggcgaggtctttacgtccgctcgctcagacgcactaagcggcgacgaggaccgtctctatatcgagctttccgctgataaaaacgccaacatcaatgatcgttcgcagctggcaatcgcaaacccttcttatcctcaccgaacaaccgaagcggcaattcttcgaatgagaaagctgctcggatccgatgagaacttcaagcgcgaagctctcggaatctgggatgaaacttcgctcacccgaaaggccgtcaacttcgataagtgggcggctcgttccatctcatctaccgacgttccgcgtgacggcatccgagtttttgcagtgaagttctcaattgatggatctgcaatcggtctcgccgccgcaactcgccccgccaatggccccgtgcatgtggaggctatcaagcaggccccgtcgagcaacggcacgtcatggctcattgattggcttgttgagcgcaaagaaagcaccgcccagattgtcattgaaggaaagtctggagttgggtatttggtaaacgctctaaggactgagggaattccggaatcggtaatcaagaccccatccgccgatgaagctattgcagctcacggaatgttcgaatctgcaatcgcggataacggcattactcatatcagccaacaagcgctcgacgatcaaataaaaccagccgtaaagagaaaaatcggcaacaacggcggcttcggctgggcttcccccgacggcggcacggtcgtcctattcgacgccgtgacgttcgcattctggggcgcaaagactacaactcgaaatccgagaagaaaggcggtgttcttgtgagcacttggactacctcggacatctcgaagatctccatttccggcgttaccgatgctgagcgagacacaatctcggggcttctcagggcatggaatggccgcctagagaagaaccagcgccgcagcctctattacgacggcgaacaagcgttcaaggatcttggactcatgctcccgccgcagctaaagaacgcgaagttctaccttggctgggcgactatggcagttcgcaagctggcgtcaatgagtcagtttgagggcttacgactccccggctctgaggatccgtttgagcttggcgaggtttttgaagccaaccgtttcggtctcgaattctcacagggtgtcacttctgcatataagcacggcgtatctttcgcgacggtcgccaagggtgctcctggtgagcctgatgttcagattcagacgcattccgcagagcatagctcggcactctgggacgctcgacgccgcgcaatctctgcggcgctcacgattaccgacactaaaaacggtagaccgtccgcatttattgtttatcttcctgacgcgattcttcattgccgcttaggtggcaagggaacgtggatcacggagcgcacgaaaaacattattgggcgcaccctagcggtcgcgatcacctatgatccgcagctagggaagccgtttgggcgttcgcgtattactaatccagttatggcgcttacggatatggccgttcgagcctatgtccgcatggaaggcaatgctgagttctactcatcgccacaggttgccattgagggcattgacgctgaggcgtttgacggtgacccgtcatctcagaagcgcttccagctcgcaatggatcgtcttatcgctctcacgcgagacgcggacggtcacgcgccgaatatcaagcaactccagcaagcaacaatggctccacactcggacatgttgcgcacggtagcaatggcattctctggcgaaactggaataccaccggcaagccttggaatcatccatgacaatccgtcatccgctgaggctatccgggcgaataagcatgacctactcgtggatgcgacattccagaacaagtacgttcttggaaccgccgttcgcgatattgcctcactcgccgtcatggtgcgcgatgggctaagcgaaccaccttctgacatgtggcaactctccgcgaagtttgcggaccctgagttccggtcaacctccgcgaatgccgattcttacgtgaagctggcgagcgcgaatccggcgcttgcacagtcccaggtattgcttgaaacggtctttgacgacgatcaggtgaagcgcattcagtccgacgtgaaccgctctgcaattacgcagttagtccagaacattggcgcgaatcgcggaagtgatgcgcagtcaatggtcgcaaccgcagagggttcaaccggcaccggatcggtgactagttaggggatctcgtgacggttttccctattgaggtcactcaaggctttcgcctggttcaagaagagattcgccgcgaagcctatgcgcgattatcgcaattggttgcggctgggattactcgcgagcaattgattgatattgctccggagatcttcggcccacttggcgatcttatgatcaccgcgagcgtcaagtggtacgacgagttgcgcgagcttcaagaggtctccggatcattcgtggcggaaccgcttgagtccgtgtctcgctcgcggtggcactccttggcagggtatggcacgagttcggttgcacttgatgaggtcgtggacgctgatgcgtttgggcgtattgcgggcgggctgacatgggttctcactgaggcgtcattcgacacaattattggcaacgccgagattgatacaaccccggttggataccagcgcgttccgagtgccggctgctgcgcgttctgcgcaatgctcgcgtctcgtggcgctacgtatggctcctacgagtccgcaaaaacggtcgtagggcgtggaactgagattccaaaggttcgacgccgtggcggtcaagcaaagggcatccgtccacgcggatcccgccgactcggagacagctttcacgactattgccgatgcaccgtagttgcggtgcatgagggcaactctttcaagctcgaacaggacgcagatcgctactacgagcaatacagcgaatcagcgaagaaggtttctgagggtcaagagtggattcctggagagcgtgacgctgacggtaatcgcaccactaaggggcgatgggttgacgctgacggaaaaactcgctccgacaaggaaaagaagcaacagatcctcgcttcaatgcgctccgaattaggaatgcgctaacaaggttttcacggcccaccgtgaagcggcacgcacccgttcaagtgcggtcaatgatgccagacgtggctaaacggagaggtgattcggcatgcccgatgcagtaaacaacaccagcacggtggacgaacaaaccactaacgccgttcaggcggacgcggtaaccagtgctcaagaattcaaggctccttcttcacaggaagagcttgaccggatcattggcgagcgcgttgcacgcgagcgcaaaaagtatgagggatacgacgaactcaaggctaaggctgagcagttcgagtcggttctctctgaaaagtctgcactcgaaaacaaggttgctgagttcgaagcgcagtctgagcgcaatggttggctcgctgaaatctccaaggaatacggcattgcgccagacgtcctccgaggtggcacgcgagacgaactagttgcccatgctgagcagttgaagtcattccttgttccacagtccggcccagttattcaagggcaagaaaaagttccagcgccaattgaggcgagcgacgaaatcaaggccgtccgctccctgtttggcgcataaaccgaaaggtaaatcatggctattttcagcaccgctgaagccaaggttctgctcccgcgcaatatcgcggacggcatgatcaaggaaacccgttcactttctaccgtcgcaaagctttcaggccgcgagcctatgaagttcggcgagaccgattacatcgtattcaacgacttcccaaaggcggagtttgttgaagagggtgccgacaaggcgagcacgagtggcggcttcagccccgttacggctaagcctcacaaggcgcaggttacgatgcgcttcagcgaagaagttcagtgggcatccgaggattaccagctgaacgtctttagtgagcttgcaagcgccggtcaggaagcactttctcgcggcctggaccttggcgtctaccaccgcatcaatccgcttaccggatccgttatcaccgcctgggataactatgttggcgcaaccacgaagcgtgttgaaatcgccacggctgacgctgatgcggatatccgcaccgcagctggcctgctcatcaattcggccccatcctggggcgtaaatggcatcgcgattgaccctaagtttgcttgggcgctcgccgacctccagaccgagaatgcagacggatccccttctgggtctcagcgctacccgaaccttggactcggaacggacatcacctcgttcgcatccatcccagcagctcagggcaacaccgtatccggcaccccggaggcggttgatacgaaggttcgcgcaatccttggcgacttccagaacggcatccgctggggtattcagcgcgagcttcctgttgagcttatccgcttcggcgatccagacggtcagggtgacctcaagcgcaggaaccagatcgcacttcgcctcgaagttgtttacggctggtacgtattcgctgatcgcttcgctgttatcgaagacaaggttgcataacttgcctcgcttcaaaaataaggtaaccggctccattgtgaacgttgacgaagagactgcaaagactctggatcagacgttcgtaaaggttgtcgaaaaggcatccgcagcttctgagaaataaggggtaagtcatggccgacgtaacgcagtttgcgacacttgctgagcttattgagcgctggccagactttcccgcaggggctgaggatcacgccaacgtgttgctcgctgatgctagtcagttcattgtggacaccgttcccagtgcgctggccgcatcggcgagcacacttcggcgcatcgtttgtgctgtcgtaaaacgtgcaatggcatctggcgacatggctggcaatgagtcggtccagtttggagccggcccattccagatgaccgccaagccgaccaatccacacggcgacttctacctaaccaagcaagagcgccgcgcgctgggtgaggggcgtcaaacggcgttcggggttcagatcgcgtcattctatgcggttattcatcgtccttggtgcaatctgaattttggcgcgctctactgctcgtgcggcgctgacattgcgggggttccaatttatgaataaccgcatagtcacccgtttccccgcctcatggcgcacctcgtttacgattcttcgcggcggcggtcgcgacaagttcactaatccgcttcccgaatccgagattgaagttccgcatggtctaatcgcgcctcgcgtctcgactgagcaggacgacttttcggatctcgcagacgcaaccgccgtgctgtattgcgatctaacgcccggtttatcgttcttgaacactgaccggatacgcatcccagaaggctcgcgtttggctggtatttggtcaatcgtggggcgtcctggtgaatggccgtttggctgggaagtggggctaaagaaatgaagctccagaagattcccggcgtcaagagttaccgctcgctgaatcagggcttgcgcgttcttggcgcgtctagcgagatcggcaaggcgactctagaggttgctgagggtgttgcgggatcggctaactcgatgggtgaagcggagtattcagcggtgcccacgtcggttcgctttggtcgcaacaatgaagagcgttctggtgcgtccgtgcaggtgacgacgcagcattggcgcgacgctcgcgatcaggttcttcttcgccttattcaggttatgaaggtgagtaagtaatgtacgacgctctcatttggcctgacatccgcaaggctctcgtgctcatggtggacggcgaggaacacgctggttcagtcatctacgcagctcagcatatggaagttgacgctaacggaatctcacatattccgctcgcgttattcctcgattcggctggtggaaacatcggctatatcgaccgtgccgaccgtgtgctgattgaggtttacgcgccgggcgagcttgcaaagaagatcctcgaaagcatcatcacctcattgtgtggtgacggcatcgaggggcctgacgtgttcttcgattccattcagtgcatcgtcccgcctactgaatcgccttacccgcaagacactctaaatctagcaacggcggtcattgagactatcgttcgcccgctcgactagtcgcccacctttcaccccactcggggtttctccacattgacaccctcgaaaggggttatttgctatgtccacagtagaaactgagcgcaaggacttcgactcccgcgcactcgttcggaaaactacggtaggtctcgcgtgctttgcacctaagactgtcgagcttccggctaccctccttacttctgcaaccgaaatcgcagacctgtccacgctgggcttcattcccattggcatggttacccgcgacggttacacgttctccggcgagatcgaaaaggaagacattgacgcacttggctattacagcccggtccgctcggatgttacccgcgtaccgcgcaccgtttccatgacgcttcttgaatccggcaaaaaggccattcaggaactcgtgcgcggtacgaagatcaccgaaacgcagtctgctacgactggtgaagttgtcttcgatgagccagacctcccgaacttcgatgaagtccgcctgatcgtagtatccgctgacggcccactgtccaatcactggatcgaggggcgcggattcttcgccgcaaagatctcatcccttggcgaagagacgtgggcgcatgaaggtgctcaccagcgccaagtgacgttcgacatcttcaatgatgacgtcgagggcgtcccggttcgccattacttcggcggctccggcgcgattctcgctaaggacattctgggatacacccagggcgcctaacccctagttgtggcgcgcacgtccttgggcggctcgtgcgcgccgcttttcattgccgccccacgaaaggtagtcatgcctactttttccaatggtgcccaaaaggtcaccgtaagcaagccaacccgcgcagaaattcagcgactcaaggcacttggattctttgaagagaagcccgcgccaatcgttgaagccaagccagtaaacccatctaagtaaaggagccagtcatggcagccgcccgcaagatttcagataagccagcaccacgtcacaccatcggatccattatcaaagacggcgaggacgttgagccatatgtgctcgtgctcgccgatgggtcagagatcacctttgtttctccggaagaactcgaagctgagtcaggtgttcgactgctccgagctgcgacgattcgcccgcatgagttgtgggagattcttggtgaatggcttcccgaagaagagcttcgattgattcgcaagcagaaattcacgcttggtcagattggcaagattctcgccgctgtcaagactcactttgaggacttcttcggcccctcgggaaactagaacgcctcgatgcgctcttagaacggtttaggccagagatccgcgccgatctcgcacatgagtacggcgtggatctctcattgttctatcagcgccgcaggtacgtggcattgctggatctcattgatcagctcccgcgcacctcgcgttacttcgaggcgatgtccaaggatcctgagtttattcaggcgcgtctagagattgaagaatctcgcaccgacgacgaagaggataacactccagagtggcatccaagcatcacagagtttggactcactgagcagctacttcgcgagcttctgcactcaatccaagagggcaacatgatcgccatgcgtgcagctggtggcaagcctccgaaacctaagccattcccagcgccgttcgatccactcgccgaagcacgcgctgatcgcgagattgagcacgtcgcgggactcgctgagatgtttggcttcaagcgctctgacgtcactctaaagccgccaaaaaactaaatcctttaagggggtcgcatgcctactatcggcgttgctgaggtactgattcgaccgtctttcaaggactttcaaaaggaagtcggcaaggttgttgacggcacctctaagggtggtcaagaatctggcaagagcttcggctccgggttttctggtgccgctaagggtgcattgcttggcggtgctgcggctgcggctggcggtttcgcgttggcactcactaagggcttcggacgactccagagcctagagaatgcacgcgctaaactagccggcctcggtcacgatacgaagaccgttgagaccatcatgaatgacgcgctgaaatccgtaaagggtaccgcgtttggcatggatgaagcggccacggttgcggcttcggctgtggcgtctggcgtgaaacctggcaaggatctagagcgcacgctcaagcttgttgctgatgcttccactattgccggcgttcccatgaatgaaatgggcgcaatcttcaacaaggttgcaggtaccggcaagattcagggtgaagtcctcgcgcagcttggcgagcgcggcatccccattctccagctccttggaaagtccctaggtgaaacccctgagtcagtccagaaaatggcatcagagggaaagatcggcttcgaggatttccaaaaagccatggagcagggcatgggcggcgctgctctcaagtctggcgacacgttgcagggtgctttcaataacacgctcgcgtctatcggccgcgttggcgcaaacctcttgagcaaggtttacccgaagttcacggagttcttcaaggggctgctcaagcttctggagccggtagaagagtgggctaaaaaggctggcgaggctattggtaaattctttgacgaacagctcgtgccattctttgcagcgctctgggattggctcggtaagaatacgccgctcctgtggtctatcgcgggcgctgcggctgcattcttcactggtcttcttatttacaagacggttacgggaattattggattcttggcggctgctcgcgtcgcattcctgaaactcaacgcggcaatgctggcgaatccgatcttcattgtgattggtcttatcgcgctcctagttggcgctctggtgtatctctaccagaccaatgaggacgctcggaagttcatggatgaagcgtgggctggcattcaaaaggtcatcaagtgggcttgggagaatgtcattcaaccggcattcaaggccattgtcgatttcgtgatgaacgttctcattccggccattgtctggttctggcaaaacgtgatcgtcccagcttggaacggcatctcggcagccgtgaaatgggcctgggagagtgtaattctcccagcgtttagggcgattcgcgacttcatcaacaacgtcctagcgccaatcttcaaatggctttacgagaacattattcgtccagtttggcaggctatcgtcgcagctgtctctatcgcttggggcattctggatacgatcttccgaaccattgtatgggttgtgaaaaacgtcctctcaccagcctttacatggctctataagaacatcatcaagccggtttgggacaaggtttctaaggtcatcacggatgcgtgggaagacgtcatccagccagcattgcgcgagttcggtaacttcttccgcgacgttcttgagccagcgttcaaaaagggcgttgatgcgatcaagaagatctggaatggcatccagcgcatcgcagcggctccaatcaactttgttatcggcaccgtctataacgatggtctccgcgttgccctgaacaaggttcgcgagatcgtcggcggcgacgcactgccacgacttggattgattgacgtccccgcatacgccactggtggacaaatgcgcaacggctggaagctcgtgggcgaagaaggccccgagcttatccacacaggccccggctacgtctacacggcgaacgagaccaagcgcatgttggcatcacaacagcaagcgccaatggatgcactcgatacgctcaacggcggacgctccaagaattccccactgccaatcggcggctggctggaagagcttggaaacttcgggcgcgacacagtgcgcaatatcggcaacggtctcgactgggtgcgtggcggactggcagatgtggcgtcaatgctactgaatcccgtcaaggacgcaatcaagacgctcctacctggagagaatgctttcccggatattgctcgccgtgcttcgacgggtgcaatcgacgcggccatttcatggattcgcggcaaggatcagatgaccggcgatttcggcggcggcgctggtgggtacttcggctacgacggaccgcttggcaacttctaccgtcctcgcggtgtcatcacgtccggctttggtacgtctcgtggtcgttacccgcacgcgggcatcgacttcgcaagcccagtcggtacgccattccgcgcaatgtacaacggcatcgttcgcaaggcgggctggaacatcgttgcagggcgtacaggtattggtcagctcattgatcacgcgaacggcatctctacctacgtgggccacctttcaaaggttctcgcgggtgcaggctctcgcgtcaagggcggccagattacggcgcttaccggcaatacaggtaagtccaccggtcctcacgctcacgttgaaatgtggaagaacgggcagccgttcaactgggctggatacctccagcgcggtggtggcggtcccgtcaaggcgttcgctaatggcgggcgcgcttccgggtggtctctcgtgggcgagcaaggccctgagctggtgaatttcagctcccctggcaatgtgttcacggctcgcgattcggcaggtctcacggcacttctaggcgctctgagcaatgtcagcaactcgcagagcttcgacgcaatcaatgcgtctctcgcggcatctcgcacaccgtcacggatggaactggtactcgaaaacggccagcgcctttcgggatacgtgcgcgaagttgctggaagccaactagacgaactagcgcgtgacgctcgcagggttgtccgcgcacgataaggagctatcttggctatcacttggggcgcatctaagactggcggttctaacggtattcggctgggctacgagtttactcaaagcccggccaccgttggaaccggcacatcttcggttacggtcacactgaagctgtatgtgtggactatgggtcctatctcggattcgactaactcgctcacggtaagcggcgatttctcattctccggtagcgtctcagtttccacgtcgtcgggttcacagtggtctacgtctaatcagcagctcatcaagacgatcaaccgtactttctcgccactgtatggcggcgcggttacgtctagcttctccggctcactgagtggcattgaggctgtcggcgggtccgtcacggctacggcttcaggttctacgacgacagccaagcggccaccctacgcaccggatgcgccaaccgctgtaactgtagctcgcacggattcgacgcggcacacggtctcgtggacgcgcacgaatgccacggatccaacgaagatctatgacacgcaaacgatccagcgcgcagacgttctaggctccggctcatacgtcacgatctccacgctcgcgggttcatcgtcgtcattcgtggacacttctacggtctcgaataagaaataccgttaccgtgtccgcgccaacaatgacagcggttcttcggcgtgggcttactcgcccaccttttacaccgcgccaatctcgccaaccgatgtcaaggccgcgaagtctggcggcgatattgccgtttcgtggactcgacgcgcacatgtcgaagcgcgctacgaggtcgaggactgggcgaacggtgttgcgacaacgccaacgattctcacggcggcaaacgcggcatctactgtcgcaacggctcccgatccagctaagacgcacgcttaccaggtgcgcgctttcgttgacgatgcaacctttgggcgactctattccgtctattcggtgcaatcggccacggtgcaacttatggcaccgccgaacgcgccaacgaatctcgcaccaagtggcaacgctgcggatggcgcaaaggcgatcacgctctcatggcgtcacaatcccgtggacaccaccgcgcaaacgtactactcgctacgtcaccgcgccgtgggtgcttcgacgtggactacggtcgccaagacggcaagccctacacagtcccgcgcgctcgcggctggaacctacgcgaacggcactagctttgagtggcaggttcaaacgtggggcgatcatgctaccggctccgagtggagcgcggttgctgttgtgccactgtccgcaactcctatcgcgacgatccttagccctgaaacggttctaggatccaagctgaccgctcaatgggcttatgcggatccagagtcaacgaatcagtcagcttatcgcgtcacgctcattcagtctaggcagactctcgaaacatataccggatcaggttcggcatcatcgcgagttcttgcaacgcgactcgataacggtggaacttatacgctcaaagtcgccgttcgcgacggggcgggattgtggtccgcagatacttcgcaggtgttcacggtctcctatgcgccgccaccatctgccacggctacggctatctatgacacttccacaggcgcggcggttatcgaggtcaccattcccggccccgggtctggcgaagtggacgcggttacatggcacctagagcggcacactggcgcgggtgattgggttgcggtcactaactcaatctcggttactccaggtctttccgagtctgttgttgaccagctcccggccgtgaatgctctcaatcggtaccgcgtgatcacgacctcagagcttccatccacggccacatcggcagaagttatcctcgacacgtccaagcatcggggtttcgtctacgtcaacgccggccccggattctcgcaagtgatcaagtttgcagatttcgccacggcttcggtcaacgcgacacgcgagcgggtattcaacaactttgcagggcgctcgtatccagtagctactaccggcgagacgcgtgacaagacagttagcgtttcagggcgactaggggataactcttctacgccgtccgaggttgaagcgcttatggatctcgcgggaaccttctgtgtgcgcgctccttacatgaagcaaggcgcgggcgggaatgttcgcgagtttgtgcagcccaactctgggactgcactggaatttgagcgcatcaagggcactgtctcactgagcttccgaaaggtggatttcattgagtagcgtcgtattttcggatcttattgaccgtcggacttatgacgcgcttactgaccgccacgaagaattctggacgtatcagcgactcgatcgaaacctaaacctcatcgaggaagtggatggggttgacgcgtgttcggtcgatctgaacttcaattcggatgtgcgcggctccggctcattctcctaccttggctcaattgactggcgtaagggcaacttgattcgcccggtatacacagtcaaggctggggattctgtcgcgtcatggccgctgggtgtctacgtcccaatgtcgccgcaacgcaagcatggcgctacgggttcgccgtgggaatttcagatgtacgaccgcatgatgctgttgcgggacatcaagatgagtaacacctatacggcggcaaagggcatcaacgccattggtcgagtgaagtacctgctcacattctggggcttaccccaatacgtgattgacgactccgatgaagttttgcgcacggcgattacatgggaaccaggaacaacggttctgcgtatcgtgaatgatctgctcgctgccgtgaattacttttcgatctacgcggacggcaacggctattttcgatcacagccatatcagcggccacaggatcgagcggttgagttcgggttcattgacgacgaaaagggtatctacgcgccagagttcaccgaagactatgacgattacgcagtgcctaaccgcgttgtggtcgtctcggagggcgacagtgacgctccggccattcgcggattcgcgcaagacaatgaccctaactcgccgttctccacggtgacaacggggcgcattctcacggcggaggtcgagagcgtagagctgacatctgagactgtcgcaatggcctacgcgaaacggcgacttggtgagctgcaacagatcacttccggcttcgatattgagcacgcgccgatcccactagttggcggcgatgtggtcacgttcgccaactcgactagtgatatttcaattcgcgccgtggtgcaaaaggtgtcctactcttcggagcttggcgcactgtgcagcacgactcttcgggaggttgtcggtgcgtaatccactagctgacattatgcccgcaacgtcgagcgcttcggattcatggattgaagcaaccatcacgcaggtgtcgccgctcaaggtgcatctcattacggacgacgatccatcggacgcggaacctatcgcactcaatgacacgccactcgcggcaggtgatcgggtgtgggtgcagatgcgcaaccgccgcttgttcattgtcggcctcattacgccgcgtgagacctccggaactattgcggggccagcgctcacatgggcgtctacctactcaccggcgtacgtggcaacggcgaacgtctcgacgccctacgcgccaccagagggttacggcttccaggtttacacgatccaaacatctggatgggtgtgggtttcggttgcctcgcaaacagagtcaaccgtcacgcttcgagtctttacctacgacacagcaacgccgccaagtgaccttattgtcacgctcggctggcgattagtacgaatctaaataaggggagttgtggcatataaccattacgcagaactagtggtggcagactccactaccgggcggccactcgcgaatcaggttgtgaaactgcttgacttcgagactggcgcagaagttgacgcatatcgcgacgaggtggcaacactccttgtttctggcgcaaacggtctagtgaccccatttcagacattagataccactcgccgcgtgaagatgatcgtcggtggcgtggagtactcgcgctggtgtgacgagatgatcctccaagtcggcagcgcggtggatgagctcgaacggctgacggtcacaaatctcgccattgatacagacggcaccccttatatcagcattgggtcaactggcgctcgcatcctcgttgacacagacgggacgccctactttgaacaggtttagcgcaatggaacacaaaaactttatcagccttttcgagctaggagcctagtatgcagacaccagatgtacgactggtcacggaagagaagctgactgaggcactagttggcgtcaccggcgcaggcatccccatcttcgaaacccttgctgaggctgacgcttacgaggcggcgaacccggggaagattgcgctgacgcttgagccttcgacgccggatacgacggcccctgttgcgggtaccttgtcggggacggtgacgcataattcggcggcgttgtctgtcgctggtgcgtctgatgatcgtgtggtggcggggtatgcgttcaaggtgaattcgggtgcttggtctgcgtggcagtctggcagttcatattctgcgacggggcttacggcgtctacgtcgtatacgttccagcataaggtcaaggacggtgctggcaatgagacggtgggtacgtcgattgctaagactacggacgccatgccagttacggttcctgtgggtgattacgacaacgctgttctcgcggatagtccgttgcattacttgccgctggatgatgctgtggggtcctccactgcccggaatcttggttctgcgggcggcacagttgcggtgactggattcacgtttggtgctacgggtattggtgacgcggcgacgtgtgcgactttgacgcagacgtctgtgacggccagtatcgcgcataatccttcgtctactggtgcgacgtgggagtggattatgaagccgactgggtatccgactggcggcatgaagatactggaatacggcgctgacgcttttgtgatcatgtatccagagaatgacggcgttcaccccgcaggtcagatcgcgtcgtacttcaagaacatcatctcaactggtgccacgacgctcgaccagcgcaagcatgtggcggttacgtggactagcgcgggcgtttcgaagttgtatatcaatggcacgctggttaatacggcgaccgcggcggtgcccaccatgacgtcgttcgtgttcggcaagatcgttgggcaggttgcagggtttgcagtaacgaattctccgctttccgatgctcggattcttgctcacgctcaagcggcgggggttgcgtaatggcgaatatttacagcactcaggggaatctggtgactgtgtaccggacgagcggcgctttggtgtttggtgattccgagccgcccgttgagccggaaccgtggacgcctcccgtgtatgtgcagacggttcggcaggcgatgaaccgtactcgccccatgaataaccgatatgggggtgccggggctgattccacgacctctcttacgtcgcgacgtaagcacgtggtgtatggcacagggcaagggttccgtctcgtcttcaataatcttggcgggctcagtgtggggccgagcccctacacggtcaaggtgacctttgagacgctcgctggcgcgctgattccgtttacctttggcggcgccagttcggctgtcgtggagccgggtgcgctagtcctgaccgatccgattgacattactcccggagagtactgggtgcgaacgtttgcatctgtggcagaggggaaccgagttccttgtacggtcatcgacgacgcgcaccggactggtgaggctgtgtctatgaatgtagacctgaccggagtgacagggccgattacaaagaatatcgcgcagggtcctgcaccttccgccgcgatagagactggcaccggaattgcggttggcgtggttggcgactcggtatctgcgggagcatacgacatcatcacagagcatggtgcgttcgcccgaggtcttaccgcagccggagtgccacacgtcctctggggagttggtggatctaatgccagccagaacacgacggcctactttgactctgtggcgctaccagaccccggtgttacccatgtcatcgtcgagcacgggctaaacgcgtcgtcgttcggggtcaacacctctaagacatatgaagtcgatttgtggttcaggcttcaagcgcggttccccgtcggtgtgaagctctaccagaccacgatcaatccatacactacgtcaactgactcatgggctaccgtggaaggacaaacggagctacatcctggcgtgcagggagcgtataactcgtggatccgcgacgggtgcccgatcaaggacgggttgcacgccgcggttggcgacagcaccgcaatcagggctggcgaggaaggccacccactggcagggtggatcgagttcgcgggaccggtcgagtcctcgcttggatcgaaccgttgggcagcaccgggcggcactcaactaactaacgacgggcttcacccgaacggcgaagggttcgctctaatggccggagcagtacaagcgtgggctgaagggcttagcgcctagtaggcaatatccatctggtagtccatagcgcatttgccggagcagaagtcagagccgggagccttcgaaagttcgcggcactggaagcacatgtcacgaggcacttccagcttccatagcatcacggcccgacgcaagagagtcatcatgtgactgatgctactcgccgcagcacaaattacccagaggagtccatcatgtggcgtgccacaatcccacataggaaaaagctatgatccgcacctatcatccgatctatacgccgccgaggtggtgggagcgtatcctcgtccatccaatggagaacgccctcgcagtcctcgcaatcgtattcggcgtcgtcatgtcagcaagtatcccgatcgaccatttccagccgtccccagcaatggcggatatgccgtggccgctcgtggcaatctgcgcggggttcattggccttggtggagtgacgagcgtgatcggcttgcactggcatgactcgcaagctatcaacagggcgtgggggattgagcgaaccggatggatactctcagcaggcggcttcttcgtctacgcaatcgccgtcgccattagctacccaaactccgtgttctcatggctcgtacctgctggactgggcatcgcctcatccctacgcgcaatctcgctactcgtcatatggctggtggcacgcagaaagctgggggtgaaatgagtgagacgctaatcatctccattgtcgccggcatccttacgatctttggtggcgcggggttttggagctaccgggcatcacgagccgaaacgccactcaaacaaggcgcgcacgatcttgcgctggcggcgggtgcgaaccagattctcctaacctcactcaagagtgttgaggatcggctcgaaaagcaagacaagcgcatcgacatcctcgaagctgagctagaggaagagcgcaccgagcgcaagaacttcgctgaccggctcgaacgctgggcgatctggtatcagcagctcgcggctggctgggaagtccaccgccagaagccaaacgcgccaccatcaccggacacactacgcacctgagagggtgctttttattggagtgagacatgccatatttcacaggactagcgagggtagcgcgtacaactggctaccccgtgatcgaggtggacggctgggagaagcgcggacacgggccaatgctgggcgcgaaaaccatcaaatgccaccacacagcgggtggcgcaaacgggaacttcccatcaatgggcaccgtgctcaacggacgcacggggctatcaggtccactgagtcactacggactggggcgcgacggaaccatctacgttatcgccgctgggcttacctaccacgctggcgcatcacgcacagttgaagagggcaactcctactcaatcggcatcgaggcagagaacacgggcgatggaaccgagccgtggggagctaagcagctcgactcctacgtgaagctctgccgagcacttattgacgaattcgggctggatgtctccaaggtgcaaggacacaaagagaccgccatcccccttggccgcaaacctgaccctcgcggcattgacatggacgacttccgcgcatgggtcaagcgcggctactacatcaaagcaaccgttacaccaacttccaccaccgcaaaggacgaaatcgacgtggcaaccgtagacgacattttcaagaagctcgctgagttgaagacggctattgacgcgaaggcgtctaaggctgacttgagcgacattcgcgccgacgcagctaaggcggcaacggctaaccaggtgaactctgtttacgttcgccagcgtgagtatcaggccgcaaccgatgaacagctacgacagctcgccaaggcaagcaacgtagtattcgacgccgccaaggtgcaggaagccgcaaagatcggcgcaaagctcggcactgaggaagctattgcaagcggcttcacagtatcgggcacgacgaccgttgaagtaaaggcggctgagtgatgatcttcactaaggcattctggatgggagcggcggaacgtgcgatcaagaccttcttccaaactttcgtcgccgtggtcactgccgcattcggtgtaaacgctatcggcgttagtgccgcactcggtgacgtgtcatggctgaacgcgctgtcaatcgccggactcgctaccgtgctatcgctcgccacctccatcggcaacgctgaattcacggctggcacgagctacgacggcaagcacgtggacattagcgagtagactgtaatcactatgactcgtagggccacatggcacaccgcgagtcctcacaaagacccccgctctccacttacggagggtgggggctattcgtgtttttgtgctaaaccaaaggcagccccggagagtgcacgaacactcgacccggggcctgatcactaacactggaatggttctgtagtcatgcgcctaaaagtgacctataagcatccttatacgcacttccgtgtaaaataggggcatggaaacagaccttgtcgagcagttcatccactgggccgagcgagaccgcaaccgctcgcctcacaccatcgcccgataccgagccaccctgaaacaactagcagacccaggagccgcgacacgcgaggaggtcgaggcgtggtgggcgagccgatacgacgccgcaccggccacccgagagaatgaactagcatgcctgcgatccttctaccgctgggccatgcgattcgaccaccgagacgacgaccctacccgccggctcgacgcgccgaccgtccccaataagatcccgcgcccaatcgccaaatctgacctagaacggatcatcggcccgctcacggtagaccacctggaaatacggcgggcagtagcgctcggcgcatatgggggactccgagttgcagaggtcgccgctctcgactggtccaatgtggacatcgaatcccggcgcatctacatcagaggcaagggggccaaggagcgcgtcaatggcctgtctgcggtcctccaggacattatcgcgccgaataccggcgggaacgtcgttacggccgggggcgggcaatacagcgccgccgtgctgcaacgcaaggtgaaccgatttatggagcgcaccggcatcaaccagaccttccacgacctgcggaagcgaggggcaacccaggcaatggccaaggtccgcaacccgcaggctgtagcgcaggcgttcggctggtcatccttgcagaccgtgactcactatgccgtcgtaggagacgagacgctggatgaaatcgccaacgccatgatctagccgttgtaggtttcctacagacttcgaccggcacccgtatttcagttgacaggtttgattaggtttggataggttctagtcatgaacgaaacaccagaacaactaacgatcggggaggtcgcccgagtgctcggcgtcacagttggaacgatccgacgctgggaagcggagggtaagatcgccgcaacccggacccctggcaaccagcgtcgatttgaccgaaccgaagttgaccacctccgcgacgccgcctaactccggcaaacacccccaagcagtattccgactgcgacccacgggtccagcgcagataaggagtctaattgccatgcccgaaaacgaattgtccacagtaactggcttcaagaatcgcatcatcgaggcaagccctggaatcaacgaggaatacgccaagcgcgttgcgactcgcctaaagaaacgcatggaccgcatgaccgaagagttcgacttcttcgccgagctgcggatccttggaatcatcagtgacccaacggcgctaacggctgtgaagaatttggaggccgccgcatgacccccaccgactacccacccctaacccacgtcctcgctggcgtgggtttcgtttttaccgtcattctcgcgccgtgcatcgcggcgtgggcactctgaaagggagagttatggaaaaggaaattaggccagaggacatccgcgtcggtgacacgatccggcgcgaatgggtgtatctcgacacgaggtacacatccgagggcaaggttaccgcaatcgacgctgacggactctacctagaggttggcagtgggacagtatggacgttccatttaaataggtacacatgtttcctcgtgcaccgtccaacgcctaccctgccaaccgagcccggctcagtgatcatcgcaacgaaggtgcgcggcaaagagggcaagtggcgattgatgcgcgacgtggatagtgattggatttcgcccgagcgcatcctcggcgctcaatttcaccgcgacaatgacatccaagaatggctaccaaccgaaatcttcgaggtgaccccgtgagcgacaacctcaccgtctaccgcgagctagagcagaacacgccagaatggcttcaagcgcgtgccggtatcgtcaccgcgtccgtcgtagggcaactcatttcacgcgagtcagtccccgctatcaactacgactgcccggagtgtggagcgctcgcattctcgccatgcctaagcaaagtaacgaaggctggtgctgatgccaaggaaatcaagacgctccacagctcgcgcagctctaaggcacgagagctaaacgaaagcgtcctcacgttctcccacggtgatacggcaatgtcactcatcgccacaatcgctgccgaacgaatcacgaagcgcgtcgtccagatcatccctagccgcgcaatgatacgcggaacacttgatgaaccattcgcaagagaggtctacgcgcaaacattcgcgcctgtcgaagaggttggcttcatggtgcgcgacttcggaaacttcaagcttggatactcgccagacggactagttggcgatgatggcctgattgaaatcaagtcacgcgagccgaagattcaactacaaaccgtcattcgcgacgaggtgcccgctgagaacatggcgcaacttatgaccggcctactcgtgactggccgcaagtggattgactacaccagctactgcggtggaatgccgctgtacgtgaagcgcgtctacccggatccagcttggttcgaggcaatcactgacgcggtagatgacgctgagggtcacatcctcgcgtgcattcacgagttccaggatgcgaccaagggcgcaccgcctaccgaatacatagaccattgggcagaaatggagattgagttctaatggatatttcgagcagcatcatcccgaaaagcgaccaaattaatgccgatgacctggttgcaggtccgcgcactgtgaccgtagcaaaggtgagccaaggttcaccagagcagccggtcaacgtgcatatcatcgaggatccaaagcgcgcataccgacctagcaagtcaatgcgccgcgtgctcgctgaaatctggggcacgcaatcagataactgggtgggcaagtctctcacactgtttcgcaacccaaacatcaagttcggcggcgagacggtgggcggcatcgagattagtcacatgtcgcacattgataagcctgtgactgtttcactcacggcaactcgtggcaagcgtaaaccgttcaccgtgaagccgctcctggttgcgcagacgattgattgggcggcagtgattccaacgaagaacgccgaagagctccgcaacatctggcagaccaaccccgaagctcgcgagcttatcgaggccgaggttgcgcggcgcaaggaggaagagtgaacttcccaaacctcgcacgacttgaaaagtatcacctagaagatacaagtgcagacgaaatccgagaaacggacatctgggacctagcagatgccgcatacgacgcaatgaaagaggagcagtaaatggcgaacgaaaccatcattaccattatcggaaatctaacctccgatcccgaactacgattcaccccgtccggtgccgccgtcgcgaactttacgatcgcatcgacgccacggacgtttgatcgccagtccaacgaatggaaggacggcgaagcgctattcctccgcgcttcagtgtggcgcgaatctgcggagaacgttgccgaaaccctcaccaagggtatgcgcgtgatcgctcaaggccgcttgaagtcccgcacatacgagaccaaggagggcgaacgccgcaccgtcatggagctggaggtcgaagagattggcccatcgcttcgtttcgcttcggcgaaggtgactcgcgctcagcaaggcggtggtcaacgctcgcagcaacagcccgcgaatgacgcgtggacgaatcaatcccacgccgaatcaaccggctgggaagttgttggcgccggcatgcatggatccgatgggccgccgttctaaacctgtacataaacacgtacagagccttgtatcccgcaaaacaacccccgcgccttgtggcgctttttttatgccgtggcgcgctcatgacgggcgcgccattggcgtacctgagaggacatgctttgaatgagattgacgaagatgcacacctcgcactgtgggtcgatgaagtgacgtgcgaagaactgaattacatgtacgcacgcggtgggatcgcttatcccgtgagcggcgacttcatcacgacgggccgcatcgagaagcgctggagctttaccggtgacgactaaaggccatgtgccagacgcgaatctggacgtataccgagcgctcagggatgcacgtgatgccatcgagcggtactggcgcatacagcgcgtctcgcacgcgacggactcatatgggttgcggcaacttagcgaatccatcacgggcaccatgaggaccctacgcgttgacgtcgaggatccagagtgacttgcgacggcgagtgctgtcgtaacggtctcggcgtctgctaccacgggcgacgatgcgaacaccacaccagcgaagaaaacgaccataaagcgcgacggacgcaccctgatcctacgggggataaagcatccgcacgcgctgatcgggatatggaaaggaagaggaaacgtgagcaaatatcgcaccgaatttatggatgaagtggcgcggatcgtcgaagaggtaaatgcggaaaagccgctcgatcatagcgacttccaacttggcgtaaccgagggtaagcagcgaatgtcacaagctatcggaatgctactcgctggcactgacacggacccgcaaaccaatgaccaatgggaggctgaagttgacgacctgaccgcgaaactcaagaaggccaaggagtacattctgctcctacaggtattgcgcgcacggtacgccacggagaaccggaagctgcgcgatcaaatcaaccactgacccgcacagggtctttttttatgcctgaaaggaagtcatgagcaacaaagttgaggccacataccacagcccattcctatgcgatcactactgctgcgagggtgcgcacggatgctacaaggattacaaatgcgcgtgccatcgtccaccggtagacgcgatgcccgtatttattgagccgccaagtttcgagtgggcagatgacggccatgactgcgactgagtggacgaaaaccagcgccgtcgaggattggcgagcgcgcaagcaacgtgaccgtctctactacgcagatgctgaagtagcccgctgcggaacgtgcggcgagtggatgtggcggcgcaaatgcaaagtgccacacgacaacattttgaattttcgagaggaagaaaagtaatgcctaagccaagaacaacaccgagtcactgcaaggtctgcgaacgtcccatgcgtcgcactggagtatcagccaaggaagcgccggacactgtcgtttaccacgggatcacgccggacgggcgagcatcttgcgcaacctgctttcggcgcgtcatgacaggccgcgaaaaggtgttcttgaagccgctcgaagcatccaatgtcaagatccccgcgaagttgcctgatgacgttctaaggcgcaacgagggactaagggcatatgtcttggatcgtcgccgccgtgggattcctagcgttgtggggtgggcggcgtgatcaccatatgcccgtattgcaataagccgcacccaacgaccacgagcgcacgagttgccggatcctactttgtgaagccgtacaagttcgccgcgaaatacgacggcgcaccacttcgaggcacgcgccaagaggccgaactcgactactgcaaatggaggaatcgtgactcgaagtagagcatcagcaagagccgctggaacgagctttgaaacgctcattgtgaagcatctcgcggcagtcatagacgaccggatcgaacggcgcgcaaagagtggcgctaacgatcgtggtgatatttcaggctggcgatatgcgggtaagcgcatcgtcgtcgagtgcaaaaacacaaaccgcttggagcttggaatctgggtctctgaggccgaggtagagcgcctaaacgacgacgctcaagtgggcatggtgatccacaagcggcgcggaaaaggtgccgccgaagatcagtacgtgaccatgacgctgggtgatctagtgaggctgctgacgtgacccaaagaatgaaaaacgaaattctaatgaacaatcacccacagcgcaacaaaatcgcacataggttcgatatactagtagtggtaaataaaacggccccggcagtgctaccaacactgaaacccggggcctaccactgacaaggagtggcactaatgagtgtacccacagacggcttggaaggccgcaaagaaatcgcgaggacgtttctcgcgctcgccaatgacgagtatcagaagcacaacatccaccgtggatactatgcacggatcgccaaggaacacggcctaacaaatcaagaaatcgcggaggcttacgggataaccgaagctgccgtgcgtggcttgattcgccgggcggtgaagtagtgcctcgcatccgcaccatcaaacctgagttttggtcagacggaaacatcgtcagactgtcgcgagatgcccggctgctctatatcggaatgtggaacttcacgctctgcgatgccggtcatgtggacgatgacatcgtgagattgaagatcaacatcttcccgatggacaacattgacgtcggcgtaccactccaggaacttattgaactggatcgaatatcgcgcattgacattggcgatgggaagaaatacctccacgtcaaacggttgggcgaccatcaaaaaacagacaagcggtggactccacgctgccctgtttgcgctcaccaaaactccccgaaactccccgaaactcccgcgagttcaggcgagactcaacgagtctccccgaaactccccga

SEQ ID NO: 529 - DNA, 2719 bp, Zea mays
tgtatgtgtggactatgggtcctatctcggattcgactaactcgctcacggtaagcggcgatttctcattctccggtagcgtctcagtttccacgtcgtcgggttcacagtggtctacgtctaatcagcagctcatcaagacgatcaaccgtactttctcgccactgtatggcggcgcggttacgtctagcttctccggctcactgagtggcattgaggctgtcggcgggtccgtcacggctacggcttcaggttctacgacgacagccaagcggccaccctacgcaccggatgcgccaaccgctgtaactgtagctcgcacggattcgacgcggcacacggtctcgtggacgcgcacgaatgccacggatccaacgaagatctatgacacgcaaacgatccagcgcgcagacgttctaggctccggctcatacgtcacgatctccacgctcgcgggttcatcgtcgtcattcgtggacacttctacggtctcgaataagaaataccgttaccgtgtccgcgccaacaatgacagcggttcttcggcgtgggcttactcgcccaccttttacaccgcgccaatctcgccaaccgatgtcaaggccgcgaagtctggcggcgatattgccgtttcgtggactcgacgcgcacatgtcgaagcgcgctacgaggtcgaggactgggcgaacggtgttgcgacaacgccaacgattctcacggcggcaaacgcggcatctactgtcgcaacggctcccgatccagctaagacgcacgcttaccaggtgcgcgctttcgttgacgatgcaacctttgggcgactctattccgtctattcggtgcaatcggccacggtgcaacttatggcaccgccgaacgcgccaacgaatctcgcaccaagtggcaacgctgcggatggcgcaaaggcgatcacgctctcatggcgtcacaatcccgtggacaccaccgcgcaaacgtactactcgctacgtcaccgcgccgtgggtgcttcgacgtggactacggtcgccaagacggcaagccctacacagtcccgcgcgctcgcggctggaacctacgcgaacggcactagctttgagtggcaggttcaaacgtggggcgatcatgctaccggctccgagtggagcgcggttgctgttgtgccactgtccgcaactcctatcgcgacgatccttagccctgaaacggttctaggatccaagctgaccgctcaatgggcttatgcggatccagagtcaacgaatcagtcagcttatcgcgtcacgctcattcagtctaggcagactctcgaaacatataccggatcaggttcggcatcatcgcgagttcttgcaacgcgactcgataacggtggaacttatacgctcaaagtcgccgttcgcgacggggcgggattgtggtccgcagatacttcgcaggtgttcacggtctcctatgcgccgccaccatctgccacggctacggctatctatgacacttccacaggcgcggcggttatcgaggtcaccattcccggccccgggtctggcgaagtggacgcggttacatggcacctagagcggcacactggcgcgggtgattgggttgcggtcactaactcaatctcggttactccaggtctttccgagtctgttgttgaccagctcccggccgtgaatgctctcaatcggtaccgcgtgatcacgacctcagagcttccatccacggccacatcggcagaagttatcctcgacacgtccaagcatcggggtttcgtctacgtcaacgccggccccggattctcgcaagtgatcaagtttgcagatttcgccacggcttcggtcaacgcgacacgcgagcgggtattcaacaactttgcagggcgctcgtatccagtagctactaccggcgagacgcgtgacaagacagttagcgtttcagggcgactaggggataactcttctacgccgtccgaggttgaagcgcttatggatctcgcgggaaccttctgtgtgcgcgctccttacatgaagcaaggcgcgggcgggaatgttcgcgagtttgtgcagcccaactctgggactgcactggaatttgagcgcatcaagggcactgtctcactgagcttccgaaaggtggatttcattgagtagcgtcgtattttcggatcttattgaccgtcggacttatgacgcgcttactgaccgccacgaagaattctggacgtatcagcgactcgatcgaaacctaaacctcatcgaggaagtggatggggttgacgcgtgttcggtcgatctgaacttcaattcggatgtgcgcggctccggctcattctcctaccttggctcaattgactggcgtaagggcaacttgattcgcccggtatacacagtcaaggctggggattctgtcgcgtcatggccgctgggtgtctacgtcccaatgtcgccgcaacgcaagcatggcgctacgggttcgccgtgggaatttcagatgtacgaccgcatgatgctgttgcgggacatcaagatgagtaacacctatacggcggcaaagggcatcaacgccattggtcgagtgaagtacctgctcacattctggggcttaccccaatacgtgattgacgactccgatgaagttttgcgcacggcgattacatgggaaccaggaacaacggttctgcgtatcgtgaatgctgtctcttatacacatctgacgctgc

SEQ ID NO: 530 - DNA, 2584 bp, Zea mays
taaagcagaaagggcaaccataacataggagatgtggagtttagtggtgaattccaagcttcggatcccactgtggtggatgcattttaacccatcacatatacctgccgttcactattatttagtgaaatgagatattatgatattttctgaattgtgattaaaaaggcaactttatgcccatgcaacagaaactataaaaaatacagagaatgaaaagaaacagatagattttttagttctttaggcccgtagtctgcaaatccttttatgattttctatcaaacaaaagaggaaaatagaccagttgcaatccaaacgagagtctaatagaatgaggtcgaaaagtaaatcgcgcgggtttgttactgataaagcaggcaagacctaaaatgtgtaaagggcaaagtgtatactttggcgtcaccccttacatattttaggtctttttttattgtgcgtaactaacttgccatcttcaaacaggagggctggaagaagcagaccgctaacacagtacataaaaaaggagacatgaacgatgaacatcaaaaagtttgcaaaacaagcaacagtattaacctttactaccgcactgctggcaggaggcgcaactcaagcgtttgcgaaagaaacgaaccaaaagccatataaggaaacatacggcatttcccatattacacgccatgatatgctgcaaatccctgaacagcaaaaaaatgaaaaatatcaagttcctgagttcgattcgtccacaattaaaaatatctcttctgcaaaaggcctggacgtttgggacagctggccattacaaaacgctgacggcactgtcgcaaactatcacggctaccacatcgtctttgcattagccggagatcctaaaaatgcggatgacacatcgatttacatgttctatcaaaaagtcggcgaaacttctattgacagctggaaaaacgctggccgcgtctttaaagacagcgacaaattcgatgcaaatgattctatcctaaaagaccaaacacaagaatggtcaggttcagccacatttacatctgacggaaaaatccgtttattctacactgatttctccggtaaacattacggcaaacaaacactgacaactgcacaagttaacgtatcagcatcagacagctctttgaacatcaacggtgtagaggattataaatcaatctttgacggtgacggaaaaacgtatcaaaatgtacagcagttcatcgatgaaggcaactacagctcaggcgacaaccatacgctgagagatcctcactacgtagaagataaaggccacaaatacttagtatttgaagcaaacactggaactgaagatggctaccaaggcgaagaatctttatttaacaaagcatactatggcaaaagcacatcattcttccgtcaagaaagtcaaaaacttctgcaaagcgataaaaaacgcacggctgagttagcaaacggcgctctcggtatgattgagctaaacgatgattacacactgaaaaaagtgatgaaaccgctgattgcatctaacacagtaacagatgaaattgaacgcgcgaacgtctttaaaatgaacggcaaatggtacctgttcactgactcccgcggatcaaaaatgacgattgacggcattacgtctaacgatatttacatgcttggttatgtttctaattctttaactggcccatacaagccgctgaacaaaactggccttgtgttaaaaatggatcttgatcctaacgatgtaacctttacttactcacacttcgctgtacctcaagcgaaaggaaacaatgtcgtgattacaagctatatgacaaacagaggattctacgcagacaaacaatcaacgtttgcgccaagtttcctgctgaacatcaaaggcaagaaaacatctgttgtcaaagacagcatccttgaacaaggacaattaacagttaacaaataaaaacgcaaaagaaaatgccgatatcctattggcattttcttttatttcttatcaacataaaggtgaatccgacgtctgtgctggtagaaaagatcaaaggatcttcttgagatcctttttttctgcgcgtaatctgctgcttgcaaacaaaaaaaccaccgctaccagcggtggtttgtttgccggatcaagagctaccaactctttttccgaaggtaactggcttcagcagagcgcagataccaaatactgttcttctagtgtagccgtagttaggccaccacttcaagaactctgtagcaccgcctacatacctcgctctgctaatcctgttaccagtggctgctgccagtggcgataagtcgtgtcttaccgggttggactcaagacgatagttactggataaggcgcagcggtcgggctgaacggggggttcgtgcacacagcccagcttggagcgaacgacctacaccgaactgagatacctacagcgtgagctatgagaaagcgccacgcttcccgaagggagaaaggcggacaggtatccggtaagcggcagggtcggaacaggagagcgcacgagggagcttccagggggaaacgcctggtatctttatagtc

SEQ ID NO: 531 - DNA, 2322 bp, Zea mays
taaataaaatgattattgttggctcctatttcacgtctgtgacccaatagaagctcgatgtgaaagtgagtgttggaatataatataattgaattgtccacattttcctatcaacttaaccttttgagttgaattggttagtgcatgcaacttaataaacaaaaaaatgatataccacactgtttcgttattaacaaaagttttaattagttacaacgggatgtgctcccgtcagttccgtggtccacgtctagaaaacttcaccaagtacttcaatgccattgctaccagctcgggaacttgtgtgtgtgctcttctgctctctcgagtgtgactgttttgtccctataccgtcccaactttaacatttgcgtcttatcccgttacaataccaacgaacttcgtacttgctgctgcatacacattagggcgtgtttgatccaaaaataccatggtacaaaaccatgatattcgaaacaaagttttatactatgtaaccaaacacatttttggcaaaaatacaatggcattctcagtaccatgattttaatttaaaaattcaaaaatactttgttttccaaacatccccttagggcttgtcaccaaatcaagccttaatggcaaactggaccactggggtgctgtcaaagcaaacatgtacgtacgtgtaggtgtatgtcctttttttttgttattcattcacacaaagagcatgtttgattgtacgcctaagatgtcacatctaaggttagcaccttgccacatggtctaaggttagtcccattttttatctccacacttaaggttaggcatgcctataaatatgtggtagttgtttggattgctaccacaaggttaggcacacctatgaacatatagtagttgttaagtttatcgactaacataattgatgccacacttttcaatgataattttgcaaactttgttctaagatttagtcgtgtttttttattttcctattagtaagccatgtgatttgaaaatatatgaatgtgatattttttatttaactgtctcataagaaataattatttagaacaaaaccgatattatgagttggtaaccaactcatataacaatacatatctcataattctataattccatgatttgcaacgagatgtttgatcaaggtgatcaatcaatcacattaaaatggacaactgcagtcaaacaactaaattcaaccaataactatattgtcaacatgaacccttaacaaaacaaacatgttgtaggtaccagaaagaaataatagaactagtagcaacagagacaacatcacataacataatgaatatgagggtaccaaaataacatatttatatataaagcgcataacatgttcaatcatccataacaaccccatcataactccacaattcttataaacacctttaaaaattcacattatccaaaaaagtatctaaatataaataaaaagagtgatgtaatagctaacagaatcatcatccatctccataaactgtcatgcatcaatatataaaaatgcaaaataaccaacatcacatcattcatctcctgcttgtatcaacctattacaattgtaggatatcttaaaatattgtgaacataaacaacataattctattgacattaagtataacaaaaatatatagtcaattcacaggtccaaatcaatcaaatgcttcaatacacaagactcaaatgttatgtcagatgcaacagataaaaaatctcgcatacccttttaatatttttatggtagatatgtttatactatcaaattttgataagtaataattgtaatattctcaagcctttgccacaccatagcatcggagttaacaaaaggtataaacattgtaggtggtagattctgaatatcattccaaagttctaccaaagtagcactaagttcatctactatatttattgtacgactctttggtttcacttttctcttgactggtacaccatctcctcgtctacgctttaatacagaactcgatgaactgtgatcaacaccttgaggtgggtgatgatttggggatggtaacgtgtcagattcattacctaaatcattcacaggctatgaatacttaagaaatcattgcaaaaattatcattgatgtaactctcatcttcaatctgagtttcattcatgcagagtgtaccattcatggctagagagccatcagcaccgtcgtcaatgaacaactcctacataacatttaaaaactagatagacttataaaattgttccacaattgttaattcagtggtctgattggcctactgtaaagcccaaaatctatg

SEQ ID NO: 532 - DNA, 663 bp, Zea mays
ataagaacagtagatagcgatgcgaggaatacaatgagtggaatttgagaaagataggtatccaagattgtcttgatttcttgttgctccagcactactttgagcaagagcagcttctctaggttttctaaaatgtaacagtagagatagcagtgagatgaaccatataaaaaacaatgacaaagaaaacaacataaacccaataattcaagaggaagtctgagatgaagaagtggcgacgaatctccaattcaagaggacaatgatagcacaatgttgtttgtcatgaagtatagtgttctgttcagcctccattttagcaataattccttaacctactcattatattattgaattgtatcaaccttttttccaataagactaaagactcgagtcctatgagtaagcttaatgccctcaggattacattcaattcgagttgcatatttaatttcaggacaaacaattttgtgcttatgacctttgacttcttggtatattttattagtgtgcaatgtgatcaggatagaaaaaagtttctatttctttttgtgtaggtagtatttttttagacatgtattataagcatataggaaaacataacaaaaaggtaaagaaagcaatccctcactatatatatcaagagtagaaatatctttgtgt

SEQ ID NO: 533 - DNA, 672 bp, Zea mays
atctaaggaaactatacgagaagcaaatcagacaatctatggtttatgttattatctttttcattgtttctcatttttgtttttatatgatttttcttgctgatatctctgttgttacaactttataaaatatggagaaggtaccctttctgaaagtagtggtggagcaacgagaaatcaagatggtttgagtcaaacactcaaacattccccaaattgcactcattatattactcgcatgcctaactacacttcttatgtttctctcaaaacaatagtgaatcccttcgcagagccaagcagctataaggacataagtgaaatatttctatttcatcatttttaatgttttctatttttgacagttgtaagcacattgtttaaatctttgacagacattcacaatcattatactaagattgtgaatatgattgtcaaatatctgtctggaagtgcaacattcttccccagatttgttgcgttcaagtaattctgttgtctcactttatcgttacctactgtcaaaatattattcttaacatttttgcatttgataacaacttcacaccctaactattaaattgttgtcattgatagattctttgttggctttgagctctcttgattgttttatctcatcattttctatcttaaaaaaagggtctatgcaag

SEQ ID NO: 534 - DNA, 9365 bp, Zea mays
gcgacaccagtaccaagccaaccccactcgatcccaactccatttctcattactcccgaaatgaagatctgggcggctaagacaacaccagccgtcaacgtccacaccgcatcaacagagttcgctctctactggcgcgagaacggcaacaagaaaatcaactgggaagccacatggaagaacgacatgctcaaaaagcaacagtggcgcgaaaaggatggatggaagccaacccccggaactgaagctggggaactcgatgtggacagcattcttggcgtggactactggacgaaaccgaatccacccgaaggtctcccactccatgaagaagtcgcatggatgaaagagtctcgacgcaaacacaatgaagagcgctaccaactcgcactagcaaagatcggaggccagaatgcaacagaggtttgatcttgacgcagaacgggcgctgatcggctcggtgctactcgatgaacgtgtgctcgatgaactcaccgtgaatccggatgacttctttcagccagcccacgaacaactctggaagctattcacccaagagcggcgcaataacaagccggtcaacccgatcacgattagcaaccagcttgtcggtgacggcatcggtggcatcaagtccgactaccttcaccaatgccttggaatgatcacctcggttgcagcggctccacactatgcagaaatcgtcaaaggactagcgagcctacgacgcatcggagacgttgctggagtactcaccaatgcatctgagacggcgcaatgggaatccgccgaacaagtcctagataacgctcgctccgaactcgaccgagctgcatcaaagactggcggagttcgcgtgcgcacattctcggacgcgctgaagtcatcgctagacgtgtggacaaatccacggccacaaggaatcaacaccggctggcctgaacttgatcacacgctcaacggtggatggaaacctggacagctaaccgtggtgggcgctcgaccggctgtgggcaagtcactcgttgccggttgcgcggccgtagctgccgccgagcacggtgtgggcttcttcagtctggagatgcgcgaagaagaggttgtggcgcgaatggctgcggcatctcagggagtgatgttggagcacttcacaacctcacgactcacgagtgaggatctgcaacggctcgaagctctaagtgagaagtcatcgcgctggcccatgtacatcgaagacaactcgaccatgagcatgtccaagattcgcgccgccgtaaggacgtggaagcggcagggcgatttgaagttagtcatcatcgactatctccaacttgtcgaacccgccgaccgatcagaggcacgcgagcggcaagtgtcgcgcattgctggagactgcaaggcgctcgctaaggacttcaatatccatgtgttggcacttgctcaagtcaacaggaattcggcgagcaggacggacgcgaggccggttgtgtcagaccttagagagtctggcggcatcgaggcattcgcggacaacatcatcttgcttcaccgaacgtcagacaaggaatcggaaatcgagttcatcgtgggcaagaaccgccacggccaagaggcgaatctgcgaatggtgttccgtccgcacttcgcatccgtcaacagtatggcccgcgagggtcaagcagccagatttggaatgtagggaatatgccactcattgctgaaatccaagacataaccgcttactacgacgcatcgagagtccgccaagacgttgactacgtgcaattcttcggtgagcttgacctgaagcttgaccctccgaagcgctggccggttcggaatcgtgagctacgagagccgattgactcggtgaagcgcgcaatcatccaccagcgcgacggtgagttttgccgagactgtgggagtcatgcgcggttcgctgttgatcacatcatcccgcgctcagcattcctcgctgaagatgttccggtcatctccgataggtcagacaacctggtgagcatgtgctgggactgcaatcaatccaagagcaacttcgagcatcggcagatcaagaagatgggcgttactagacgctgctgggactgcatgaatccgtggtactcgcatgatgactatcacggcgacgatgaccctagacctgattgctcattgatcgcatattgcggaagttgtggaatcaccacggttccgaatatcaactggattctttagataaaccaaaagcgccgtccaactagggcggcctttttcatgagagggacaccatgagcctaaaagcagcactcgcaaagcaagccgagccaatccgcacactatgcgcgctggaaaagatttacgccacgctcgatgatgacgataagcaagcgctacgtgaggcggtcgagaatctagctattggccctaccgtcatagccgaagcgctcaagtccgttgggcatcatgccagcatctcaatggtcaagaccatgcgcgaaaagctcaaggcgggtcacacttgggagcgctagaggatcggctgaggaagaaagctgcgaacgaggttgtgtccacatctggcacgggaccactgaccgattcgtacaccatcagtagcgaggttgcgtggggctatgaggacttctgcaacttcatccgcgctaaaggccaggatccagaaaaggtctcgttcgactggggtgtgacgacaaaccccagcggcggcgtatggaacaagctgaatcgcgtaaggccgaaagttgagacgtgggcggatcttgtatcggtggaggaaatcgaagccgcgcaggatcggctcaggtcttactcactgccgcgcaaactgagtcaaaatgattccgacgctccgtgcgcagccgttctcaatctcgcggacatgcaattgttcaaggctgacggcgacgggctggaaggaacattggatcgtgttgagcgtggcattgagaacttccagcgctacatcgacaagcagatagcttcgggcctgaacctgaatgaggttgtcattgtcaacaacggcgacccatacgagggcatcgccgggaactatgcgaatcagctgcacaccgtcaagggtggcttgagggatcaaatgaacatggtcattgacgtgtggacgctcatagctcgcgagttcttcccgcagttcgagtatgggcaattcatcaccatgcactgcaaccacacccagttcgggcggcagggcggcgcaaaggaatccattacgggtgacggcgacacgggatcggcgctactcgcggaaatgcttgagcgcattcttcatgggcgcaaagagtttgagcatgtgaacttcaccatccccggcgaggagatgaacgtctacgcggacattgctggcgtaaagacgggcttcaatcacagccacaagatcccaggttccggcgcagacggcttcgagaaatggctcaacggtcaagttcgatatgacccgcgagcctatgaggtcgaggtctgggtcacggcgcatcggcacagcttgatgttctttgatcttggctcatgctcggtttttcagtgcccatcgtgtgacggcggctcgaagtggcttagcgacaagacgggcaaacattcacggtcgggcattctcgccatgaccatcggcaagcacgctccacttggctggtctgaccatgcgttcctatgagcgcgccgtcattggcgcaaaaacggctcactgagccacgaaaaccactccggcggggaaatactcgccgggggaaagatcgagccttaggcgaccgcctgaggctttcgtcatgaaagggaaagaaatgtttacggaagaagaacttgaagcggcgtgggactccactatgggcgacgagtgggcggaatgggaaagggtggttgttgatgcgcgtgcgcgttacacgagcttcgccaacgccctccacgccaagcgcgagggtgagccgattgacgcgaagaatgtgcgcgaaggtgaccgggtgcgggggaagctcgcacggctatgtagcgattatgcgaggggcgggatcgtcgagggtgtggcgtatcagccgggagtcgccggactttgtgttgccggatgggacattaatgcgctcgacgatcttcgcctcctccaccgtccagcgccgaagctccccaccgaacggccagcggttatcctcgcgaccgaggtgggcgggaagaggggcaggtgggaaatgatgctggactatcgcggccactggatctctagcgacgtgatcaacggctgcgtgcgccactacccccacgaaatcaccgcatggaagcccgccgatttcgtggtgcgcgaggaggaatcatgagcgaggagacctgcaacttggacattgttcctagcattcctgagcgccatgacgctcccagcttcttcaagcgcctcgataatgcggttcgcgagatcgaagcgatgaagctcaaaagcgaggccgaaatgatgaagcttcgaaatctggaggagtcatgagcgagccaacctacgaagaactactcacccgcaacaaccaactcgcccgcctgatcgtgaacatgaccgaccggcttgaaggctcgaagaaagagcttatggcgacggcttgggtcaatggcgtgcgggcactgcaagacatgactcaggaatcagaaacgaccgtggccctctgcctggcaacgaatccatatgccgaaccagtcgaggagatggggcaatgaacgcacgagccgagcttgactcactgaatgcgagattgaaccgcgaggcagaaacgcgtttcggcaaagcaatcctcgacgtgaagtacccacacgatgcaccgcactctgaagatgacgtcaggcatcacaggatgaaagagacaatgcaggccatctcgcagaccatcgtgagtattggggaggcaagaaagagcatcgggtcaatccttggacttgcctcaagcacttggggacacaccgggcacactaaacagcgcaaggagcgtggactgtgaacaagcactatgacaatgcaatggagatcattgaaacagccggggaaaatttcatccaagacgaggggtggactgagacaacggcaatgatggcaaccatcgacgccaatacgcacgccaccctcgcactcgcctacgagcaacgcacagcgaacctgctgcacgcgctggaaatctcagcacgagcacaggggacgttcgaccgcgaagagctagagcttcaagtcaaggaaaggttggggttgtgatgagcgagccaaataagtgggaaattgtgtcaacgccaccacctcgtcacgagtgcaaacttccacctgctgagaatttccaagtgggcacagtgatcaaatgcacggtttgcaacaagaagcatgtgtgccgtcggttgctcggagggcgagaagaaggcgtgcattggctgggtgtatcggaatgacaactttcactgagtcaactcaaggtgcttgcccggcaaacttctgcggttgcttcaagcgcgacggccgcagacgtttgccatgcgggccattcctggaaatttacttcagcggagaccatcgcatgaacagcgtgcatattgaagcgtcatacctgcgcaggatggcgccacgcaagctcgcgaatggctcgtggagtgacggcgtaggccgtactaggcctttgcgggacttcgacttctatatacggaatccgagccgaatctacgtggtcaagcttcaggagcagtggcacccgtgcaaaggagcggagctgctcaccaacgacggcttccgaacccacgccgaagcaatcgcctacgcagacaaggtggcgcgctttgagcactgaacgtatccagcttgacccgagcatgggcggcagaagcgtggcctacgtgaacatccccgaagctgagcactacgagtacatcactattgatcgcgactggtgcgaggttgagtggacgcatgtcggcaggggcaccgcgaaagaagctctctcgcaactcgctgaacgccgcaagaagcatcgtccgatcattgatgggatgacactcacctacgagcacgacggcatcaagtaccggatcacctatgaggacgtgacggaatgagcgcatctagagacattcccacatctaatgtccgcagcctacgacataaggcagccatcaaggcgaaccgggataagtacatcaccgaggttcgcgacattcgacggatccagtgggaagttttagggaggaagttgtgaccgagcaaattgtcatcattgcggtgggtgcgctaatgatcattggttttaccattctgctcgccggtattatcccgccaagcggaaagccaacacccaaaaagcggcactacgagatagtcgagtttccgccgaaggagcataaatgcaagcttccttgggcatggcgcttcaaggttggcacggtaatcaaatgcacaacatgcggctatgagcggaaggccgcgcgactaccacgaaggccccatgtcaaaatctgggatgggcacgatgaaggcaactacgaagagattgatggggtggaatcatgaccgagcaagtgccagaagcgcaagagattgaaagcattcgcgtatatgggtgtgacgtcgagttgcatcacggagcggacagcggcaccgtgtcggacgtgatcatcatcagccgccgaatcagcttcggagacgacgggcgaccatatgacgaaatcatgctggacatgtcgaacatggcgactggcatcatccagcgcggaatgatcgacgcggcaaaggcgtctattgatgacgcatggagctggggagattgggacgatgacgacgatgacgactaaaccccgcatctattggtgcgcatcagaatccatgtggcgcgtcgagattcgcatgagtcgatacatgttgcaccggcgaccattccacgactggcacgatgcgctgcaattcgcactagatccgaaagggtctttttttatgcccaattacggaggtaggccatgaccgagtttctagctgctgtggggattatgttactgatcatcctccccgcgtggacgttcgcgctgtggagagaacggcaagacctggatcaagaatggcgcgcactcaccgacgaaatggtggagcacgacggacgagtacgacgcgaaacggccgagctaaatgcgcggaagttggctttgtcgaggatgggggaagcggagtgagtgtcattcaatggattctcttggcagtgttgctttcctcgatacttgtgacgccggtggcattgttctggcctacagcgaccccgcgcagatggccatcaggggacaatgttagcgggaatacctgcgagctacccgactactacaggcttaaggcattcgacctcattgagtgcccaaagtgttcttcgcggtggacattttgggtgagcaatacatggcttggtgacgtctgccactggatgctaattagtcccaccagagatctatgcgggggtgatgccaagtgaccaagcgcgtaaccctaggctcactaatcgagatgctgacacgcgagcacatgcgctggcgtgaggacggacttgttcaagtgccggcgctgttggatgaacttgatgcggcggtgacggattcgggagtagcggcggcaagtggtggcggaagttcatcaccagccattccgataaacctaggtccattcgacttgcgcatggatatccacgcaaccgcataccagcaatgggaagaagtcgcgggatattcacacaatggttccgccgtgcaaaccattgctgatctggagaagctggagctatccgaagaatgggtgtcgcacttggagcgcgtgttactcgaatggtgtgaccgcatcgagtctgaacttggacgcactgcacctgtgagaaagttggtaggcgttccatgtccagcgtgtcagcttagcgtctatggcgaggatcgtaagcctacggtttacgttagttgctacagtctcgacggcggaatgctgccaccatctgactggctcgcggggtgcaagtcttgcggcgccgaatggatcggtgaatcattgaaaataattatccctttcttgcgcataaatgatgcaaaagaatccgatgacgtggtagcatagtcatcaggacaccttaggtgtcgaaacattcagatcgcttcggcggtctttttttatgcccgcggtgagtttcccttcctttcgcaccgcgggcattccctaagctaccgagagtccgcacccacacaagagcgttgcgcacgactccgaccgaccgcgtaccgggcgaatagtacgcgtcaaactttaggcggcgcgatgagtgtcatcagcgagcagggctgtgatagatgcggtgtccacgttagggcatacgcacgactagacacccgtgacggcgcactctacttctgccaccaccactacagcctgtactcaatcatggcgtgctcagcgtttggtgagtgggcttggacggtgacagtgaacgtgggggagttaggtaaccacgcttagttcacgttgacgttgcttgcacgcctgcacgaacttcattgccttagctgcatccttgcggtccacctcaagaagccatgagaaatccggcgaggttaccgacaaccaggattcgccgccgctcttctttttgagtgccaatgcgaacacgccggtaagtagcacgcgagatgccgttacgcgcttcgagagtgccgcgccgtcctctagctcgatctcagcgccgataagggattgacgacgctcaccctttggcttgctgagatcttcaatgtcgccgttcttgtacaacaagagcgtgccgaagttatccgttggtctgtccgagaaaatgcccatgcggtaagtcttggctatctggtggatgaatgcaaggggtgttacgtgtcgaggactggaaccgctaagtggaagcgcgtgcgcaacgaagcgctaaaggaagcgctcgaagttggattattcaactgtccactctgtcgcgtcccacttgactgggaatactcgcaacgcccaaacagccccgaggttgaccacattattccgcacgcaaaaggcggtcgggattcgctcgataacgtccgcgtgatctgtcgcctgtgcaatcagaggcttggatcgtcaacgcgccgcgacacgccgacaatcgaggcgatcgaggttgagtcgtccgggatttggtgagaaggggtggcgggttaccctcacccaccggcgtgggctagcagtgacttgaagtcgcggccgcactgaccctatagtgagtcgtattaatttaaatcataccaacatggtcaaataaaacgaaaggctcagtcgaaagactgggcctttcgttttaagctgattggcacgtaag

SEQ ID NO: 535 - DNA, 2440 bp, Zea mays
cttcgggaagcgtggcgctttctcatagctcacgctgtaggtatctcagttcggtgtaggtcgttcgctccaagctgggctgtgtgcacgaaccccccgttcagcccgaccgctgcgccttatccagtaactatcgtcttgagtccaacccggtaagacacgacttatcgccactggcagcagccactggtaacaggattagcagagcgaggtatgtaggcggtgctacagagttcttgaagtggtggcctaactacggctacactagaagaacagtatttggtatctgcgctctgctgaagccagttaccttcggaaaaagagttggtagctcttgatccggcaaacaaaccaccgctggtagcggtggtttttttgtttgcaagcagcagattacgcgcagaaaaaaaggatctcaagaagatcctttgatcttttctaccagcacagacgtcggattcacctttatgttgataagaaataaaagaaaatgccaataggatatcggcattttcttttgcgtttttatttgttaactgttaattgtccttgttcaaggatgctgtctttgacaacagatgttttcttgcctttgatgttcagcaggaaacttggcgcaaacgttgattgtttgtctgcgtagaatcctctgtttgtcatatagcttgtaatcacgacattgtttcctttcgcttgaggtacagcgaagtgtgagtaagtaaaggttacatcgttaggatcaagatccatttttaacacaaggccagttttgttcagcggcttgtatgggccagttaaagaattagaaacataaccaagcatgtaaatatcgttagacgtaatgccgtcaatcgtcatttttgatccgcgggagtcagtgaacaggtaccatttgccgttcattttaaagacgttcgcgcgttcaatttcatctgttactgtgttagatgcaatcagcggtttcatcacttttttcagtgtgtaatcatcgtttagctcaatcataccgagagcgccgtttgctaactcagccgtgcgttttttatcgctttgcagaagtttttgactttcttgacggaagaatgatgtgcttttgccatagtatgctttgttaaataaagattcttcgccttggtagccatcttcagttccagtgtttgcttcaaatactaagtatttgtggcctttatcttctacgtagtgaggatctctcagcgtatggttgtcgcctgagctgtagttgccttcatcgatgaactgctgtacattttgatacgtttttccgtcaccgtcaaagattgatttataatcctctacaccgttgatgttcaaagagctgtctgatgctgatacgttaacttgtgcagttgtcagtgtttgtttgccgtaatgtttaccggagaaatcagtgtagaataaacggatttttccgtcagatgtaaatgtggctgaacctgaccattcttgtgtttggtcttttaggatagaatcatttgcatcgaatttgtcgctgtctttaaagacgcggccagcgtttttccagctgtcaatagaagtttcgccgactttttgatagaacatgtaaatcgatgtgtcatccgcatttttaggatctccggctaatgcaaagacgatgtggtagccgtgatagtttgcgacagtgccgtcagcgttttgtaatggccagctgtcccaaacgtccaggccttttgcagaagagatatttttaattgtggacgaatcgaactcaggaacttgatatttttcatttttttgctgttcagggatttgcagcatatcatggcgtgtaatatgggaaatgccgtatgtttccttatatggcttttggttcgtttctttcgcaaacgcttgagttgcgcctcctgccagcagtgcggtagtaaaggttaatactgttgcttgttttgcaaactttttgatgttcatcgttcatgtctccttttttatgtactgtgttagcggtctgcttcttccagccctcctgtttgaagatggcaagttagttacgcacaataaaaaaagacctaaaatatgtaaggggtgacgccaaagtatacactttgccctttacacattttaggtcttgcctgctttatcagtaacaaacccgcgcgatttacttttcgacctcattctattagactctcgtttggattgcaactggtctattttcctcttttgtttgatagaaaatcataaaaggatttgcagactacgggcctaaagaactaaaaaatctatctgtttcttttcattctctgtattttttatagtttctgttgcatgggcataaagttgcctttttaatcacaattcagaaaatatcataatatctcatttcactaaataatagtgaacggcaggtatatgtgatgggttaaaatgcatccaccacagtgggatccgaagcttggaattc

SEQ ID NO: 536 - DNA, 2082 bp, Zea mays
attgtctcgtgggctcggagatgtgtataagagacagggttatgaaggtgagtaagtaatgtacgacgctctcatttggcctgacatccgcaaggctctcgtgctcatggtggacggcgaggaacacgctggttcagtcatctacgcagctcagcatatggaagttgacgctaacggaatctcacatattccgctcgcgttattcctcgattcggctggtggaaacatcggctatatcgaccgtgccgaccgtgtgctgattgaggtttacgcgccgggcgagcttgcaaagaagatcctcgaaagcatcatcacctcattgtgtggtgacggcatcgaggggcctgacgtgttcttcgattccattcagtgcatcgtcccgcctactgaatcgccttacccgcaagacactctaaatctagcaacggcggtcattgagactatcgttcgcccgctcgactagtcgcccacctttcaccccactcggggtttctccacattgacaccctcgaaaggggttatttgctatgtccacagtagaaactgagcgcaaggacttcgactcccgcgcactcgttcggaaaactacggtaggtctcgcgtgctttgcacctaagactgtcgagcttccggctaccctccttacttctgcaaccgaaatcgcagacctgtccacgctgggcttcattcccattggcatggttacccgcgacggttacacgttctccggcgagatcgaaaaggaagacattgacgcacttggctattacagcccggtccgctcggatgttacccgcgtaccgcgcaccgtttccatgacgcttcttgaatccggcaaaaaggccattcaggaactcgtgcgcggtacgaagatcaccgaaacgcagtctgctacgactggtgaagttgtcttcgatgagccagacctcccgaacttcgatgaagtccgcctgatcgtagtatccgctgacggcccactgtccaatcactggatcgaggggcgcggattcttcgccgcaaagatctcatcccttggcgaagagacgtgggcgcatgaaggtgctcaccagcgccaagtgacgttcgacatcttcaatgatgacgtcgagggcgtcccggttcgccattacttcggcggctccggcgcgattctcgctaaggacattctgggatacacccagggcgcctaacccctagttgtggcgcgcacgtccttgggcggctcgtgcgcgccgcttttcattgccgccccacgaaaggtagtcatgcctactttttccaatggtgcccaaaaggtcaccgtaagcaagccaacccgcgcagaaattcagcgactcaaggcacttggattctttgaagagaagcccgcgccaatcgttgaagccaagccagtaaacccatctaagtaaaggagccagtcatggcagccgcccgcaagatttcagataagccagcaccacgtcacaccatcggatccattatcaaagacggcgaggacgttgagccatatgtgctcgtgctcgccgatgggtcagagatcacctttgtttctccggaagaactcgaagctgagtcaggtgttcgactgctccgagctgcgacgattcgcccgcatgagttgtgggagattcttggtgaatggcttcccgaagaagagcttcgattgattcgcaagcagaaattcacgcttggtcagattggcaagattctcgccgctgtcaagactcactttgaggacttcttcggcccctcgggaaactagaacgcctcgatgcgctcttagaacggtttaggccagagatccgcgccgatctcgcacatgagtacggcgtggatctctcattgttctatcagcgccgcaggtacgtggcattgctggatctcattgatcagctcccgcgcacctcgcgttacttcgaggcgatgtccaaggatcctgagtttattcaggcgcgtctagagattgaagaatctcgcaccgacgacgaagaggataacactccagagtggcatccaagcatcacagagtttggactcactgagcagctacttcgcgagcttctgcactcaatccaagagggc

SEQ ID NO: 537 - DNA, 2267 bp, Zea mays
atggcaacatctacattggactttggaaatctggtaaaatgaatggcagaggagtgatgcaatggacaaatggcgatactcttgactgtaattggcttaatggactggctcatggaaaaggtttttgcaaatatgcatcaggagcatgttacattggtacatgggacagaggacttaaggatggacatggtatgttttatcaaccaggaagtaaaatgccttgtaaccttgaagtgtctgagtgtgtaacagaccacgatgtttcaagttcttcaagctctggtaatgaaaatatcaatagtagcttattgtttttattccaaaaactttgcaacacatggagactacacagcattttccattggcccagacgtatttcaaatggcaccacaccagtttttgatgataattctggaaacaatttgtcacaagattcatctactgtacccttgacaactgataattgtgtccaagatagtggagttgataaagtattggtctatgaaagagaatatgtacagggagtacttatctcggaaaatccaaaatgccatgattccggaatgctggatagtggtaaaacacaagagcatacatggcaaatgcaaactggagggcccatggagaccatttacaaagggcacaggagctattacctgatgcttaatttgcaacttggcataaggtaagtgcttaattgtattagtgtcttccattttttgtcatctgaattcatttttgtcaataataaattcttgtggtggttttcttcttctgggtcgttacatttatactgtgtgtacctatttaggacagttgtactttcagcacagatatgctacatctggaagaagcatatgcgtagctttcagacacagagctcacattatttatgagcaaagtattacttatgcaagaattattagcagtgggtagggaacattttgtttcagatgcataataagttctgaaaccttccaatatttgaacgacaacttaaagaatatcttttcaagaataatttggatatgctaaaactatgattttctttctttagtagtagcgatgttggatatcgtgtggcattatctacatacagtaagagttgccatggcatatttccaacacttcctgtactaattgtacgctgagcttttagggcatgtacacggttccagatctaaaaaaccatgtaggtagtaaactcaaacttaggaaaatttggtgaatccttagctcctctcaaaaagtgagcgatggttcccatactaaatcaaataacaggtttcctcacaactcccagcacgtttatcatgtgccagcatgacacagaggtggtacacctttttgctttccttattctcttggagctaaacctggattacttttgtttcaaaaacttttctttcacgaccaaaccaattcttagctcttctgcccgcaatggtatgcaccatggttttgcgagactaacaatccttagctcctctttggggcatgggttgcacatgccctatgatatatttagggaactgcataatacttatactaaattcaaacatggtatgcctcggtaaattaatctagtgaatgtccacacatcggtacctagttccctgttgctattgaggtatgcacagtcctttctaaccaccctttaatattgctatccaggtacacagtaggtaaaatcacccctgtgcctttgcgtgaagtccgttcaaatgattttggacctcgagcacggataagaatgtacttccctactgaaggctcacagtatacccctccacactgctctgtcaatttcttttggaaggattattgtcctatggttttccggtatatctctttcctgattgctaattgtattaagaatccagtatttccatacttgttttttctcgaatgtgtattgttctgttagtgttgaatgtgattcaatattgaaactatggtccatctatttctaattaactatgttgatctattatgattcaaccatctaatttactatagaagatatcaagtgtcaactaaatgaatgtggagtggttgatttgttcaacaaaaggaatttatgattagattgtctatgtttttacttgcagaagattgtatttcagaatgaattagaaactagcaagaatcttatgatcacacctctgaatcagttgtttgatttagcatgagtctgccaaacagcatcactcaaagcctcaacttgatttttttatggaagtcatgtttctctgttttactatgtt

SEQ ID NO: 538 - DNA, 845 bp, Zea mays
ttcacaataagttaaggcccttagctaatctgattcgatccttaaactttatattgtaaaatatagaggtcattacaacacctaaatgtaaacaaatctggttactataaatggcctggcgtacatggcaaagagggcctacccaatatacaaacaacactgctaacaatatatataactaaggaaggctgaaaagaatctgtgataactgaatacttcaaacataataaattaacatgccttctaaagaaacagcaatagactagaaatcacatgtcataagcagcaattcgtaaatgcaaccaaactgcaaagatttaaaatattataccagcatgagttggccaaagaacacgatgtcaacatcagttaaggagaaattttcaaccagactatggtagcctcgtgactcatcgatcaacgatcatagtgagcatggctgacaagaaatatgggattatcaaagatcctaaacatttcagttgaaagaaatgatccaagctaaaattctcagttctaaaagatggtactagtacagtagtacaattctgcaacaaagtgcaattacccgagaggtcgtctgaatatacaactgccctagttctagagtccacagttgtacatcttctacaatttgaggggaaaaaaacttccatcatgaaacatcagtggaaatgtagcagcaagatgacaaaccacaagattataaacctgaaatggcatggcatgatgccgatgacaagtcatctcctttcaccagcaaccggcctcgattccatgtgcacaggcattggtgctgcaagcccaggcttaccataggcacctctcttgttaggcttcagttc

SEQ ID NO: 539 - DNA, 563 bp, Zea mays
tctctatctttccattgagcgtgcgaacctgatcattaccagagaaactcacctttttgctcacagacgggcgagctgccacgaatgtagcattgcagccgtcatggtactcgtgggtttccaatgcatcacccataaccatctgctgatgctctttgatcagcaccttgtccacgaactccaagatccgggttagctcccggctcaccgctcgcttgccctcccggatcatcgggtctcctccctgacccaaaacacaattcaaaacccagcacaccgatggcatacagaccgacctgaacgagtttccatggtaagggttccatcacctggatagcgtcgagccggaggaggaggcccatggccacctcggagacggcggcggggtcggcgccaccgcggcggccggagagcgacccccggatcgccgcggccttggaccggagcacggcgagctccttgagctggcgcagcgtcctggagcgccgcgccaggaagcggcggaaatgggcctggatcgtccgcgccgcgcggtcactcgccgcggagggcggccccgcgcg

SEQ ID NO: 540 - DNA, 2614 bp, Zea mays
ctatgtgaagcgtacttggggatcgaccccctcctaaggttgtggcagtatttcttcggtgcaatcaaatgttatcgggtcgtggcaaccaactattagttagatcagccgttagctagctttgctccagtcggaagtcagagtacttcaagatccctctcccttcctccatttggtatgagggcgagtggttttgtgtgaggaatgtggctgcgagcgctccgttgttcaccagctgtgagtcagtgtcctcggatgagtggcaatgcagtggagaggccagcctcaaaatcgaggtaggaaacctgttgatggcggtcagtacgttgaagcagcggggtctctctagcgcgcggctggtgcgaaccttcatgcatcgccggtccagcctctgatggctcaccagaaactgatgcatcaatactccaaggtcaacaatcccgaccatcattcccctatactgcttgctctatctaagatcgaggccaaggttacaatcatcacggtgttgtcgttggatgaagtgacggtaaaggatgaagtgacggtaatgccacacaaatcagtaaaggatgtggtcgcgacggtgaggggagggcctccggctcctttagcccctgatcttcctgcgctggatgaagtgaccaccaacgaagaatctgggccccccgtgccaacctctctgcctgtctaaggggtgccttatagtgatgccttcctccatggtctccccgagggaggtttcagctgctggtgtgtctccccttaacggagcttcatcggaggagaagggtgctccagccccgctgctgccgccaccaaccccatgtgctgaggtggagatcgttcaacctgaggcggtgtcattattggttgtcgcttctactctagcaagagtcatggtcccttcgcaggcaagagggcgccgggtggaccatccttcttctcttcgtgacacgcagggcctagatgtggaggattggaggcgagtcgaatcggcttcgtctcttcacgctatccgcccagcaggagatggagaagctccgtgtgggggtcgtccattccatggcaaagtagcatgaacttgttgagctctgctctaagaccaaacgacttgagagtgaggtgacccaactacattctaagggcgaatgtgcctgggtcgaagccaatcaccttcatgtagaggagacccaactccagggggccttcatgaggtgagcttccgggtcagcgaggccgagtcatcccttggtaaggccaacgtccacctggagaggacaaatgcagagctttcgtgagagcacgacgctacagggggtgggtccctttctcactcttgtacctttttgtctttggttgatttatccttccttcctcctcagagctctggaagatgttttctcgggctgatgacgccaagagaacaacataggaggtgaaggcaacaattgtggcctaggtgcgagagctttcgcttgctggcgatgacgccattctcgtattggccgagacggtcactgcactcttcgagcagagcacgggctttaggagttccgcctggtcgttggcaaggtgtgcgccttgcttttgtcgtcgcctctaatcgaggtgcccttggtcgactggttgcggtcgcttcctggccatgtggagcatgtcatcgttgagggtgtgttccatgggagcgacctagctcttgggtaggtggtctcttactttgatgagatctacgttgttgtgatcgccgaaggcttcgccttgggccaaattgacgaggagctagactctattaaagatcaagtccacacttacgctagattgctcgccgaacgggtggatgtgaagcccctgctgactggcccctgaagtctagcatcgcccgctagtgacctgcccactagcgccaaggtcgcttcttgtttttgtccctttttgtaataatttccttggatggacaagatctccacatgacatgttatttccgcttcaaaactttcgccctttggattccggtctcaatgcctttttcggagtccacggatcattgtggtagtggtttcttctatgttagttggctggcgtgatcttcggtaggtgtagatccttttacttgcttcctgcggggcgtggcggcctaatcgccttggtgacttggtcatgacacttcgatcgaaaacatagtctggggcattggtacttaggtcggggaaaactaatcttctgtttggtggggtcttacgagggcaaagcgattgatgtgaatcttttgatcttcattgatttctctcttagcagatacagggtttgcgattcatatttgattgaatctgccttttcttacaaaacctatatgctaaaaattcccacacacgggcttccccttgcctcccttttgcctagtaatgatccgatctacgcgcgcttggcgatgtccacgacgctggctggtgtgcctgcctcaccgccatggtccttagagacaggctcctagagatcgatcaacgtggatgcgagctcgcaatttgctcatttgcatgtgtacgccatcttgatagacgtggaggctgtgatgatcctgtctcttatacacatctccgagcccacgagacgg

SEQ ID NO: 541 - DNA, 1087 bp, Zea mays
cctgtttgaactttagcttcagatattaaacacaaaatataatatgaataatgctcctactgcccgtcataatgtgtttgatttattatgattatcttatttaggtaatgaaatttacaccaaatttattacataggatattgtttggggtgtgtaatcaatttaaagatatatcccgaagttcatattcatttattttgattgaaatcattttccagtgtctaatcttcattaagacctgttttgaccaacattattttattataatcattctctttagagagcggtggattctaaagttcaattatttatcaaaggcacttattttgtatagtgtgataaaaaaattacaaagaatttcctcaaatcccaagttaggattttgggtgttacatgaagacgcgaagccaagtgtgcggacgcttacctatgggtctggccatctggggggcagtgtgccattttattttcatgcatcaataatttgcatggacaataacatgtgttcatttccatattctaggcaggtgcaaagggtctcctttttgcagtacacattttcatatcgaatttgtaagtgaggcttctaatgtcgaagtaaaaaccaattctaggtttttgtgctagatgcattaattcttggaatgatcaaaccaagcaccatgccagggaatggtttaggatatgcttgggaatgggtatacatttgtgctttcaaggtaccgaactgagtctcattcctcttttattccttttttttaagaatggtataaaatgcactaaagtgactcagttgctatgcccaaccattttgattgcgctcgacattcctttttgtggttcattccctggaccatctgatggtgtagtagaaagtggacatatttgggtttctctgggtcatgctgctgaagcagggctgcaactcttaatctgctctcctacaccaatcttcggcaaagaggccatggagttgcatagaggagaatcaggctcgaaggtaattgttgcttgatatccttctacgtacaatggatagagggaagcctctccccaaggagtagctatagtactcctagaatcatca

SEQ ID NO: 542 - DNA, 1646 bp, Zea mays
actattatagtacggacccaacaaatctgagggggcacaatgttttttccagtcgagggtttcgccgatttccaatttggaaatccattcctattttggtaccgctgtccaggttttgatttttcaatgtagtttctccagatttttttgtttttgtatacagggtttgaggtgcaattattactggattatgcataccgtacatttctagatgaaaacatttatctgcaggtttttttatttgttttcagaaaacaacatgttgcggcgaggtgacgatactatgatttttgtttattcgcaatatacttttgtgagcaaacgatttttgtaggcatattatcatgtacatagtatactctttaagtaatgtaatatacatgcattttcagttattaccgatcagtaatacgtgtaacattcaatagtaacctcaaacatgcaacaaacagataatatagtttttttactttttgaaattactttcatatgtcgaccagcaataatatgtttatatatattctttgttgtctgaatttgttttattagtatagttagtaacaacgtcgaatactcagtaataagatccaacagtcaacaaccagatagtatatttttctttaattcctttttaattcacttacgtttggagtcagtaataactccaaacatttagtaacaaacgttgaacataagtaatatgattttctttgttcgactggatttgttgagtgtagtctcagtaacgtcaaacaatcaatttttttcaattccttttgaattcactcacgtttggagtcagcaataactccgaatattcattaataacgtcggacatcagtaatatatgcatatgtagaacgtctaagtgttagcaataatatagtttaattggtaacattctaatatatagtagtatattatggacagatagtagcctttttcttgaagttagcagagttagtaatatagggggtacatatttttttcctttgtatctgaaattttttacgtttcactgtcgcagacaatgtctacatccactgagcagaagcatgggtactacgttacaatgagatgtgctccatatgcattgaagaacgcaacattgttgatgtctcataggctaaaagaaatgataaagaagctaggcttcggttcattactacaaatgaacattgaatcaattaaggatgggatgttcgtcggtctcctgttgtctagtgtgtacgactctcttctacggatcaaatttggtggacgacccttgccaataacaatagaggctattcaaattgctactatattaccaaggggagaagacaagtttcctcagctggactactagtccacgacttctgctagaactagttttaggtcagtaacaataacacccattatttttgttattttccatttttagtagccacatgttcaataatttttttattattttgttatgtatataaaattatgcgaggaaaatggaatgattaagatattcacagatgatcatgcaaaaggaaataaatgtgtataacaagcttaacttgatggaggtcacttgttgggttgttgaaggaatgaacaatgaccacgcaaaacatgggtacgactggattttacaatgtttgtttgtacttgca

SEQ ID NO: 543 - DNA, 644 bp, Zea mays
caaaggttagcaataagccaacaggacaaagctataacaaaacaaaggtaaattatatcacagcgcaacaaccttctaaatgtttctctaccaggcactacaaatattacaaatatatcgaatgtttttcatacatcaaatttatatggcctaaactttgcttcctcataaagttgctcacatatcttccagattatatcatctgcagccttctttgcctgtgccacggccacaacttcggcttggagcgcagcgtcttcagcttcgtcctcaatacgttttacttcaattattacctgcaaagtagaaacttccgactaaattttagaaagcggatccacaatacatgcataaacaacgttgataaaagaaacaagggaaaaaagcaccttcggcctttttctgctgaagactcctcctgatgctggcagccttttccgccgctttccgaagctgcaaaagagtcgaactcacacacatttgactaatataatggaaataatcagaaaaggaaggtagccgctcaaaaaccttttcaccgttcttggccatttcttcagtgctaatatctttgccgcccttggaccatatatcagataggaattttttgccccactccgatgcctcagctatagattttcgaa

SEQ ID NO: 544 - DNA, 577 bp, Zea mays
ttcgtatccaaggcctccttgagcttgtccttttctttagtaagactctgagcttcggttcggctctcaaggaggtcgctcttcaaaactaaagattcttctttttcattgcactcattccgaagcctggacacttcggacctcagtttcaaaatttctttttgggcagcttcgccctcaatgttctttctattttttagagttttgctcaaaatcaagccctgcaaagttggaaaagatagtgaaaatcatattgcataacagacaaacccgaccagcaaaaaaaacaatgcaaattatacctttaaatgtgtgtatgcaaggcagtcagaaaaatcgtcaaagggcatcagcgatagcccagcctcaagtttagggaaaccaatgtccgccatgtagcgacacacatcagtctccaaattatcagggcagcacaacagatagttgtcttgccctccaccgaagatcgtggcccccggagggtacccaagttcttcagcaaagccatacgcttcggccagttgcttagcgcccatagtttttccggccgcctggtgaatcctatattttcgacctc

SEQ ID NO: 545 - DNA, 619 bp, Zea mays
cctttttggcctcctcaatctctgcaggacctttccccttgtcctcgacaatcgcaggcttcgaagaaccaatcttctcttcggccaccgctatgactgaaggtgtcacagctggcaagggtgattgggccatcgggctttctggccttggcgcattcgcgccatgagatgcttcggtctctgtagcaaaaaccttcgcaacactatcctcatcatcttcgtcttcaaaaagagagctcatcacaggagctatgcgcacaatgtcctcttcatcgctgtccgacaaagaatcattaatctcaagctccattccagccacattcctcgccttcgtctcctcggattctgaagcgaagtcttcccagtcttccgatgtcatggcaaccacgacagttccttcagcggtgggcaggcttgtaccttcgggcacagcctaaaaaagaaaaaaaacttagcacaatacatttaaacaaaatatatataacataacttggaaaactttttcataccgacagagccgtggacaagttgtcgcggccgcttctatagtgtcacctaaatactagtgactccagcgtaactggactggccacagttaggccgcaaatgtaatcacact

SEQ ID NO: 546 - DNA, 2890 bp, Zea mays
atcctcaatagtacataataacatgcaatgcaagttgatacaaaagccaaaccaaaagatatagtaaatagactaaaataaaaactagtatataaggtcaaaagcttccctctaaaaaatgaagctaacacccaacactctacacaagcaagcaactcttcactagtgtgaagtcatatcttgtaatatatgtgaaatatattcttttttgcttcaccccgttccttgtactacttagccatagtcccttaagattgcaaggtgatggccttgttcataccatggtcccaaacataatggccctagatcatgaggtttttgttaggtttgatgacctttgtaagggaagtagattctctccatgttttaagcggcttatggacctaagagccaagagttaaggcggagtaggttttggagcccttggttctataggggccctgaaggggtcctctctcttggtcccaaagttgttgtgggagggggaaacagggcgacaaccatagttgtattcaggacccttggcaccacaagggtcctagatgtgatgtgtcatagtcctcttaagattcatttatcttgagatctagggaccttgataacacaaggggcccggttaggacttgtatgacacctagggtaacaaaatccctaaggccctaggggagaagctcaccatgccttctagaatgatttgagttattcttgcctacaatcttagaaaaaatgataaagtttagcttgttgggggcatccttacactatatttagctatgtattctcaattttttcctaaatcctttttggcccccctaattgatgtcttaggaatgagttgtgaaccaacatgtcctaactaattaagtggtagcatagtggaagggtagataggtcaagaagagcgacccaccatggaatagcggacctacaccatggtttagcttttgccagggtattgtgtttatgcatctttgcccatccatttagcattagagcatgctcccatacaccaaatcaacttgacttaccaaacagttcaccgactttattgaatagaaggtcaattgtgttttagtgtaaggattggacccctaaagaatgattgaaaaactttaaggatagtttttattaaataaatattgcttaaaccgtgagtgagtacttatggatatgccaccccttgcttgtggggctagagtgttaaccccacaagggccccaaagaaggagctccttaaagttaggattcttagggcagatgaaaaatcattcattcgccaatccttggagaaggcgataaaatattacctaattaggggacttatttacatcatacttagcaaattcctatatttaactcctaaaacctttttgaggccctagtttatgcttcaagagggtggcatgataatcaatagaccctgactaagcggtggcacagagaaaggatggtctaggatagaaagggtgacccaccatggcagagcaaatctatactagggctttgttgtttctaggtaatgcctattggcatatttgttggaccacacaatatatatctatcatacatcactacatcctagtttgccaagggtcgcaccgactctattaaataggaggctagaaggaaccacatatgagtgtaaaatatagttaggaaccctgaaggggtataaccaaaaaaagttggaaggtattttctataataattatgtgtataatagtcctgaccatagggaagcttcctagtaggacatgctcatgttcctgcaataactcaatgagtgtaaatttttccgtgtcaggggccacacatataccatactcaacctatttccttaagacaactcttgaaattgccttagtgcctagaagacaatatagggaaattgtgtaatctactaggcatgtctcgtaccaagggacaatgcaaatgagaggatggctaggcttagagagtggcaacccaccatggaagagttgattcataccatgacttagccgttcttagggctacacctctaggcctcatggtgaaagttttgaaaacacatccattgcatccgacaatggactatctgatgcatctcatagaggaccatccactgcatctcacagaggaccatccaccacatctcatagtggacacatcaccaagtcacatggtgaagtattagagtttttagttcattttcaagatcttgtctattttactgtgaccagtgtgaggatggttcatatgcaaaaacatataaaacagaaaaagtacagagtaatcaaaaaaagaaaaaacatggatggacattatttttaaagtgtgtaaaatatatccgggggacgtggcgtcactgttgtaatgacattcagcacgctcactcaaaactttcaatgacacacttagtgacacttactcaacacattcagtgctcacgaacgacaaagtgttggtacaactgtatttatagagaagacacccaaccaggaagcggtactgaatacttaacatttagtattagttctataaaagaattagtgcttatctaattctggtgggaatcctatttggggtggcgagaaatgaagatacctttcagtatcggttcttaccaaaaacttgtactagagttgtctctactttttgagccaactgttggttttttagtaatggttagtgtttccaacaggtactaaattagttaatattagcaccggttgtggacaacaaccggtactaatatattttgcatggatcttcaaatttaaaatcgacactgaagctaatacaaataacgattttaaatcaacctaaacaaaagttgttggattgatgccccattctctagtaatgttaaaatgatactaaaaactcaacacatagcctactataaaat

SEQ ID NO: 547 - DNA, 2660 bp, Zea mays
taacttgtgttttgtggaacgctgtttaacgccatcctgattcagggtgagctcatctggaaaataagaatattactgttagcaaagcactgaattgtttaatccttcggtactgttgttctgtcattccaaatggtcgtgccctagcccctctgattttatggttatctaacaattctattcagtaaacaaattctgcaagactgaaaatggacatgaaaaatgaggctattatgactggagtactagtgttcagtgtcacaatataagtgctatgctaaattcagctcgcaaaggtgttaaacctgcagctccattagtttagctcctgatttattttttcaaatgttttttttcattttcaaccatttgtacagattttagtgaaatccggtgtattttctcattttgatttattttaaacttgcattccttttatgacgggatgtaaatttgatagcagaagatatgtgaatgagtatcacaaggttgctacttgtattaacttgctatttctttcagcgatgcaatgcaaaagtttctgattttctgaaggtggacaaacatgctgaaacattcacagttcagtctgcagagaattttttctgctcttagcgtcaagcaaattccacttcctttttgtaagtacaaatcccactttgtgaagtttgcctaaaagtaaaactgagagagtttggggcagctgccttgcttggatgggcatttggtttaaccatcaatctataaaacagtgtgcctgttctcttattgctgtactctccggaattcattttggtgctcgttctttttgtaacaagctaaacaatggaattgccctaaaggatagaagccttattaggtttgacaggaatttgattgacatgtttacgctacatgaacttttgcaacagtgtacacagaagaggtccctcttggttgggaaaggctgccatggtttagccatccatttgggtttggtaactgatactgtcacatgcaatattctcatcaacttgtatacaaaatgtggtaggaatgattgcgctcgccatgtttttgactcaatgtctttcagaagcatagtctcatggaataccatgattgctgggtatacctgcaatggagatggtttacaggctctgaagcttttttcaaagatgcaccaagaagggacacagatgagtgaatttaccctgtccagcaccctatgtgcatgtgctgcagaatgtgctactatagaatgcagacaattacatgctatagcaatgaagcttgcattggactcaaatagttttgttggaactgctgttcttgatgtttatgcgaagtgtaatatgattaatgatgcctgtttggtttttgagaagattcctgagaaaactgcagttacatggagtacattgtttgtaggactcatgcaaaatggtcttcacgaagatgcattacgtctattccagggttcacaaagggaagggatacaattgactgaattcactctttctgctatactcagtacatgtgcaagcctagcattgatgattgaaggaatgcagctgcatgcagatgttatcaagtatggttttaataacaatttgtttgtggcatcatctcttgtggatgtttatgcaaggtgtgggcagattgagaaagcctatctagtatttgctgacatgaaacacaagaatgttgtcctgtggaatgcaatgataactagttttactaggcatggtaaatctttggaagcaatgattctctttgagaaaatgcagcagtcagggatatctccaaatgaagttacttatgtctccatgatgtcggtgtgtggtcatgcaggtttagttgaagaggcccgatgctactttgatctgctggttactgatcagactgttaaacctaatattgttcactattcttgcatggttgatgttttggggcgatctgggaagactgatgaggcttgggaactgattcaacaaatgccatttgaaccaactccttctatgtggggatctttgcttggttcatgccgtaagtacaggaatgtcggaatagccagactagcagctgaacagcttttcaaacttgaaccagaaaatggtgggaaccatgctttgctttcggatgtatatgctgccagcggaagctgggagaatgctgtgttggcaaggaagtatttgaatgatactggtgcaaggaaagatacagcctcaagttggatgtaggcaaagccgcaaaggttaattctcatattattgtttatgagcaaaaagaggagctgtttgtgcagactatcatttaactatttaagtacagcccatgttcttatgtggacttctggtaattgagaactaaatgaggaatagcaagcatttatccgtgactctccaacgctcttacacactcatcatatattaaattgttgccatgtggtagtggcagtgtggcacgctgcacaggaggtaaatgtcagcacttctactgttaacattgtcagtgaagtcaatagtattaatgtcatgctcctggccccatctagtgtaatatcaacactatcatttgaatgttaattataagagtaggtagtgtcaagggcggacctaggtagagactagtgagggacaggccaccgctcaattctctgttgtaagtagtagagcata

SEQ ID NO: 548 - DNA, 1293 bp, Zea mays
aattcataaaacatattcacgttcttgcttctatagcacaaatgtttgcatctagatctttcactctttttgttgtagtttacatatgtttcatcaggttttgtttctgtttgccaaatgccggcgagatgtgatccatcgtttcagttttataagcacgaatttgtacttcttgcatggcagactagacattaattagtcttctctagtgtaccctatagtaataatgagcgtataacattagctataaatagcgttagagtacttccggtagtactattccggtcaccattggcactactccagacctaagtagagttaggatctaccttgacagcatcatatttgtcatgttaagctctacatgtctcaacacttctcatgcccaaactgatgaaaaggtacagtgcaaaaggagccaacagcacattattggtggtgattaaaggtgtcagcagaaagccagcagcacattggtggtgtagagcagcagaagtatagtagaatgagttcaccctttccattgtatttatacacctcgagaaggtgctcaaagacagacagacagacccttgactggaggagtgatacattcattttgctgaagaaatgtggttatggcgcctgaccttatgtcgtcagtgccagggccctacactagtacactcctactgcaattttaatttcacccataaatttatattttccccatacatatctcaataccaaacatgaataatctgggatagagatgtatggagaaaaacaaacttatattctataatgaaaaacaaacttatacctttagtactttaaaacaccaatttcctgtgtggtacgttttctcttaacgagctattacactacagataggttctaaaatgagaagtgtgattttcaacgtatttgtccatgaatttcgaaagttacattattccatccactcttttcgtgtgcagcataacgacattgtgctacaatgtttacgacctgctaaataacaataatagcataaatagttgattatgttagtcgtccagctaatcaagtcggtgaccccgccgctacaaactgcatgcagaagcagcgatacttcacgatgcttcctaatctaagttgataatggatacaaaacatgtggtttagacaaatattgcacaaaggagtggcctctgctagtgctagcagtgctattggggttttattgtgaggcaccgatgccttttttttgtgagaatggtacaaaccagagtattgactacattgatgttgtcgacctacctgtcatttagt

SEQ ID NO: 549 - DNA, 515 bp, Zea mays
acacaatgaccactgacaaaataaaataaatgacgacatcctcaagtacatgagtaaaatgagcaacaatacaaacaaacacggtacaggagaaatcactaaacatgaaaacatactacataacaacagccgtccgattagtttctacggcccagattagatggacgtgggtcatgaatcgttacgcgggtgcagccattgttttggattaaaattccgatggccccgagacatccctgccccgatccaaccgaggccatcggattggcatccagcggtcacattttaatacgacgaaatgctacgcgccgcatgatctcagtcgttcatcacttttcctacggcgctggttccatcacctacctctcgtatcgaacacggaagcgcgagcagtccgcgtggcagagctcgccgatgagcgacgtgcatgacgccgatcaggccgaagccgaaccctatggatgactcgctctacgcgtcaaggactcacaagcgcgaaagagacgtgtcacacg

SEQ ID NO: 550 - DNA, 536 bp, Zea mays
tgtgtcggtactttacttatgccccggccgtggctaggatctcggagcgcctccacgttcaacgacggtttcgcgttctgttgcgccggcgcgagaggatagggctgatgagctggccctacacgtcagcgtccgggatcaacacacgcgtgcgcgtgcgggctgaccagcggggaccaccacacatcgacccaggcgagagctcctcctgtgctctgacgcagctgaggctgaggagtgggcctaggtcgccggcgtcgaggcgcgcgtggatgtagtgcgccacgcgattcgggtggagtgggtcggccagtgggaaacgaccgatgcggcgttttaggttttgcttttccttttctgttttatttttaaatctcaaattttaattcaaaatttgttgtgaatttcacacttggatcaaatgctcaaatcaagataccagcatgaagaagtatttttattattttatatatattctttctagttatcaagaaatttattaacttgtatgtgtatatatttatatatgcatgtgt

SEQ ID NO: 551 - DNA, 750 bp, Zea mays
atggaacacggtggagaggtcgcgcacgacggggaagaaggcgcagcgtgctgacgccaacggtgcagcgggagacgggagcctgcgcatggtgggcgtcatcttcgtctgcggccgcggaggcgcccacgccggcttccgcggcaccgacgttcactcggtcggcgcccctggacgaaaacacatatgcatcagagaggaagagggggagcacggcaagaaggaaccgcgcgactgcaggaaacgatgtataactcaaaaaaatatatcaaaagggactcgtaagcgaaagaaaccagatctgccccacaaggaaagattttggtgcaataggcaaacaaacctctttccgagcaacaatcggagcgggcgatgaaggcgacaatacaggaggcggcggagccgacaatgaaagggatttgaagtaaaaagtgctgggaaaaggatgacacagaaaagatgaatgaaagcacgcaaagcgactgggagagtgacgacgtgaatcgagtgagaaggaagaaagatggggcggaaagagcgaagataggcatccaccggccaagcatatcaaacggaagtatccagagacagaaatatcgagagacggagggagcagaggagcgatttgagccgtccaccgatgatcggacggctaaaatttttttaaatgacgtggatagcacaccgttttggaccagcttttataggtagctgcttcctagtcgcgacgattggagcccgctgccctgg

SEQ ID NO: 552 - DNA, 20 bp, Artificial Sequence
  synthetic oligonucleotide
  misc_feature (2)..(3): n is a, c, g, or t
  misc_feature (5)..(20): n is a, c, g, or t
cnnrnnnnnnnnnnnnnnnn

SEQ ID NO: 553 - DNA, 19 bp, Artificial Sequence
  synthetic oligonucleotide
  misc_feature (4)..(19): n is a, c, g, or t
csdnnnnnnnnnnnnnnnn

SEQ ID NO: 554 - DNA, 1000 bp, Glycine max
gtttattttagtatttagtggcctataacaattttgtccttaaaaattatctttgataaattaaaaaatagtatttatgaattattacttttgatctttttctaagctcaaagttgactgacatttttttagagatatcacatgtaaaatattattagcttcaatgtttgatggtctgtgacagttttattcatacctcaataaatcaagagataagcgtctataaattatcttccaccttaggtgatataagatttttagtgtacctaaacatgtacattaaagatatagtttaccttttgatagaataaaatattatcattttcacgtgaagatgaattttgataattaaattttgggtaaaatgactacatgttcaagatattgtttttgcattcttaattatcaacgacgaggtacttctcatgctgtcaggtttttgttgtcaaatgtagcagttaccacttttcaacattcttagttaacaactctttactaaatgccatcgtcaaaacacatagttatatatgtacatatataattcgccgataaaaataatgtacatagttcaaaacaagtccttatccaagtcacaataatcgttggcacgtatatttatttatttataactactaagaatggtaaaacttgccatcgcatactgttttgccaaagttcttattaggtggtttttaactttttatatgatgcacttgatcaatagataattgttcagtcaaagaaagggaaattaatgaacaaattaaagataataaattttataagcatacttactatgaccacatacttatccgtttccacagtatatatatatctatgtatattggttctcctccatcatcagcaatgacaatgaaactatattgaaatatatcccctttgttcattgaaaagttgaaaaactcttaattttgatcgtatgaacatcattaccatcgttgtcaatttcatcattagtctcaacctctcagccgttata

SEQ ID NO: 555 - DNA, 20 bp, Zea mays
gctaccgtgcgtaatccagg

SEQ ID NO: 556 - DNA, 109 bp, Zea mays
acgttggatctcctatcataacgtttggtttgctaccgtgcgtaatccaggtgggtctcaaactcatctccttaatgcattatctatcatgtttcaagataaacctttc

What is claimed is:

1. A recombinant sequence comprising a non-genic plant genomic sequence and a DNA of interest, wherein the DNA of interest is integrated into a target site in the non-genic plant genomic sequence, and wherein the target site is located in a haplotype window associated with a neutral to positive impact on one or more agronomic traits, and wherein the target site is further located at genetic distance greater than 1 cM of a haplotype window that is associated with a negative impact on one or more agronomic traits.

2. The recombinant sequence of claim 1, wherein the target site is located less than 1000 bp of low genetic diversity, wherein low genetic diversity is defined as having from one to ten distinguishable haplotypes across all germplasm in the intended heterotic group, the intended maturity group, or the intended heterotic and maturity group.

3. The recombinant sequence of claim 1, wherein the haplotype window is between 40 base pairs and the full length of the chromosome, with at least 99% sequence similarity across targeted germplasm and contains two or fewer indels of transposon size (˜3 kb).

4. The recombinant sequence of claim 1, wherein the haplotype window is defined by genetic distance and wherein the genetic distance is 0.1 cM, 0.2 cM, 0.3 cM, 0.4 cM, 0.5 cM, 0.6 cM, 0.7 cM, 0.8 cM, 0.9 cM, 1 cM, 1.1 cM, 1.2 cM, 1.3 cM, 1.4 cM, 1.5 cM, 1.6 cM, 1.7 cM, 1.8 cM, 1.9 cM, 2 cM, 2.1 cM, 2.2 cM, 2.3 cM, 2.4 cM, 2.5 cM, 2.6 cM, 2.7 cM, 2.8 cM, 2.9 cM, 3 cM, 3.1 cM, 3.2 cM, 3.3 cM, 3.4 cM, 3.5 cM, 3.6 cM, 3.7 cM, 3.8 cM, 3.9 cM, 4 cM, 4.1 cM, 4.2 cM, 4.3 cM, 4.4 cM, 4.5 cM, 4.6 cM, 4.7 cM, 4.8 cM, 4.9 cM, or 5 cM.

5. The recombinant sequence of claim 1, wherein the agronomic trait is one or more selected from the group consisting of: yield, ear relative maturity, ear height, ear number, increased ear size, grain moisture, increased ear dry weight per plant, increased number of kernels per ear, increased weight per kernel, increased number of kernels per plant, decreased ear void, extended grain fill period, test weight, pod number, number of seed per pod, pod position on the plant, number of internodes, incidence of pod shatter, grain size, decreased days from planting to maturity, increased stalk size, increased number of leaves, increased plant height growth rate in vegetative stage, plant architecture, resistance to lodging, percent seed germination, seedling vigor, juvenile traits, efficiency of germination (including germination in stressed conditions), growth rate (including growth rate in stressed conditions), increased number of root branches, increased total root length, efficiency of nodulation and nitrogen fixation, enhanced nitrogen use efficiency, increased water use efficiency as compared to a control plant, efficiency of nutrient assimilation, resistance to biotic and abiotic stress, carbon assimilation, physiology, enhanced disease or pest resistance, or environmental or chemical tolerance, enhanced cold tolerance, nutritional enhancement, enhanced seed protein, enhanced seed starch, enhanced seed oil, plant height, enhanced plant morphology, growth and development, and stay green rating.

6. The recombinant sequence of claim 1, wherein the non-genic plant genomic sequence is a corn genomic sequence or a soybean genomic sequence.

7. The recombinant sequence of claim 6, wherein the corn genomic sequence is selected from the group consisting of SEQ ID NOs:123-172, 294, 299-551, 555 and 556.

8. The recombinant sequence of claim 6, wherein the soybean genomic sequence is selected from the group consisting of SEQ ID NOs:251-282, 554.

9. The recombinant sequence of claim 1, wherein the target site comprises at least 10, at least 15, at least 20, at least 25, at least 30, at least 35, at least 40, at least 45, at least 50, at least 55, at least 60, at least 65, at least 70, at least 75, at least 80, at least 85, at least 90, at least 95, at least 100, at least 150, at least 200, at least 300, at least 400, at least 500, at least 600, at least 700, at least 800, at least 900, or at least 1000 nucleotides.

10. The recombinant sequence of claim 1, wherein the target site comprises one or more, two or more, three or more, four or more, five or more, six or seven of the criteria selected from the group consisting of:
i. the target site is located greater than 2 kb from a 5′ or a 3′ end of a gene in the plant genome;
ii. the target site is located more than 1 kb from a 5′ or a 3′ end of a repeat region in the plant genome, and wherein the repeat region is at least 2 kb in length;
iii. the target site is located more than 1 kb from a 5′ or a 3′ end of a repressive chromatin mark in the plant genome;
iv. the target site is located more than 200 bases from a small RNA (sRNA) hotspot in the plant genome, and wherein the sRNA hotspot is a sequence from 0.2 to 1 kb in length;
v. the target site is within a region of the plant genome of low DNA methlyation;
vi. the target site is not within a region of the plant genome associated with at least one DNA methylation read containing an MspJi motif or a LpnPI motif;
vii. the target site is within a region of the plant genome that exhibits a total k-mer redundancy score of less than or equal to 30%.

11. The recombinant sequence of claim 1, wherein the DNA of interest comprises a gene expression cassette comprising a sequence selected from an insecticidal resistance gene, a herbicide tolerance gene, a nitrogen use efficiency gene, a water use efficiency gene, a nutritional quality gene, a DNA binding gene, a selectable marker gene, and any combination thereof.

12. A method of making a transgenic plant cell comprising a DNA of interest targeted to at least one non-genic plant genomic sequence, the method comprising:
i. selecting a target site located within a haplotype window associated with a neutral to positive impact on one or more agronomic traits;
ii. introducing a site-specific genome modification enzyme into a plant cell, wherein the site-specific genome modification enzyme cleaves the target site in the non-genic plant genomic sequence;
iii. introducing a DNA of interest;
iv. targeting the DNA of interest to the target site, wherein the cleavage of the target site facilitates integration of the DNA of interest into the non-genic plant genomic sequence; and
v. selecting transgenic cells comprising the DNA of interest integrated into the non-genic plant genomic sequence.

13. The method of claim 12, wherein the target site is further located at a genetic distance of greater than 10 cM of a haplotype window that is associated with a negative impact on one or more agronomic traits.

14. The method of claim 12, wherein the genetic distance of the haplotype window is 0.1 cM, 0.2 cM, 0.3 cM, 0.4 cM, 0.5 cM, 0.6 cM, 0.7 cM, 0.8 cM, 0.9 cM, 1 cM, 1.1 cM, 1.2 cM, 1.3 cM, 1.4 cM, 1.5 cM, 1.6 cM, 1.7 cM, 1.8 cM, 1.9 cM, 2 cM, 2.1 cM, 2.2 cM, 2.3 cM, 2.4 cM, 2.5 cM, 2.6 cM, 2.7 cM, 2.8 cM, 2.9 cM, 3 cM, 3.1 cM, 3.2 cM, 3.3 cM, 3.4 cM, 3.5 cM, 3.6 cM, 3.7 cM, 3.8 cM, 3.9 cM, 4 cM, 4.1 cM, 4.2 cM, 4.3 cM, 4.4 cM, 4.5 cM, 4.6 cM, 4.7 cM, 4.8 cM, 4.9 cM, or 5 cM.

15. The method of claim 12, wherein the agronomic trait is one or more selected from the group consisting of: yield, ear relative maturity, ear height, ear number, increased ear size, grain moisture, increased ear dry weight per plant, increased number of kernels per ear, increased weight per kernel, increased number of kernels per plant, decreased ear void, extended grain fill period, test weight, pod number, number of seed per pod, pod position on the plant, number of internodes, incidence of pod shatter, grain size, decreased days from planting to maturity, increased stalk size, increased number of leaves, increased plant height growth rate in vegetative stage, plant architecture, resistance to lodging, percent seed germination, seedling vigor, juvenile traits, efficiency of germination (including germination in stressed conditions), growth rate (including growth rate in stressed conditions), increased number of root branches, increased total root length, efficiency of nodulation and nitrogen fixation, enhanced nitrogen use efficiency, increased water use efficiency as compared to a control plant, efficiency of nutrient assimilation, resistance to biotic and abiotic stress, carbon assimilation, physiology, enhanced disease or pest resistance, or environmental or chemical tolerance, enhanced cold tolerance, nutritional enhancement, enhanced seed protein, enhanced seed starch, enhanced seed oil, plant height, enhanced plant morphology, growth and development, and stay green rating.

16. The method of claim 12, wherein the non-genic plant sequence is a soybean genomic sequence or a corn genomic sequence.

17. The method of claim 16, wherein the corn genomic sequence is selected from the group consisting of SEQ ID NOs:123-172, 294, 299-551, 555, and 556.

18. The method of claim 16, wherein the soybean genomic sequence is selected from the group consisting of SEQ ID NOs: 251-282.

19. The method of claim 12, wherein the target site comprises one or more, two or more, three or more, four or more, five or more, six or seven of the criteria selected from the group consisting of:
i. the target site is located greater than 2 kb from a 5′ or a 3′ end of a gene in the plant genome;
ii. the target site is located more than 1 kb from a 5′ or a 3′ end of a repeat region in the plant genome, and wherein the repeat region is at least 2 kb in length;
iii. the target site is located more than 1 kb from a 5′ or a 3′ end of a repressive chromatin mark in the plant genome;
iv. the target site is located more than 200 bases from a small RNA (sRNA) hotspot in the plant genome, and wherein the sRNA hotspot is a sequence from 0.2 to 1 kb in length;
v. the target site is within a region of the plant genome of low a DNA methylation;
vi. the target site is not within a region of the plant genome associated with at least one DNA methylation read sequence containing an MspJi motif or a LpnPI motif; and
vii. the target site is within a region of the plant genome that exhibits a total k-mer redundancy score of less than or equal to 30%.

20. The method of claim 12, wherein the target site comprises at least 10, at least 15, at least 20, at least 25, at least 30, at least 35, at least 40, at least 45, at least 50, at least 55, at least 60, at least 65, at least 70, at least 75, at least 80, at least 85, at least 90, at least 95, at least 100, at least 150, at least 200, at least 300, at least 400, at least 500, at least 600, at least 700, at least 800, at least 900, or at least 1000 nucleotides.

21. The method of claim 12, wherein said DNA of interest comprises a gene expression cassette comprising a sequence selected from an insecticidal resistance gene, a herbicide tolerance gene, a nitrogen use efficiency gene, a water use efficiency gene, a nutritional quality gene, a DNA binding gene, a selectable marker gene, and any combination thereof.

22. The method of claim 12, wherein the site-specific genome modification enzyme is selected from an endonuclease, a recombinase, a transposase, and any combination thereof.

23. The method of claim 22, wherein the endonuclease is selected from a meganuclease, a zinc finger nuclease, a transcription activator-like effector nuclease (TALEN), a Cas9 nuclease, and a Cpf1 nuclease.

24. The method of claim 22, wherein the recombinase is a tyrosine recombinase attached to a DNA recognition motif, or a serine recombinase attached to a DNA recognition motif.

25. The method of claim 24, wherein the tyrosine recombinase attached to a DNA recognition motif is selected from the group consisting of a Cre recombinase, a Flp recombinase, and a Tnp1 recombinase.

26. The method of claim 24, wherein the serine recombinase attached to a DNA recognition motif is selected from the group consisting of a PhiC31 integrase, an R4 integrase, and a TP-901 integrase.

27. The method of claim 22, wherein the transposase is a DNA transposase attached to a DNA binding domain.

28. The method of claim 23, wherein the transcription activator-like effector nuclease (TALEN) DNA binding site within the target site of corn genomic sequence is selected from the SEQ ID NOs presented in Table 1.

29. The method of claim 23, wherein the transcription activator-like effector nuclease (TALEN) DNA binding site within the target site of soybean genomic sequence is selected from the SEQ ID NOs presented in Table 2.

30. The method of claim 12, wherein the DNA of interest is an exogenous sequence.

31. The method of claim 12, wherein the DNA of interest is integrated into the target site via a non-homologous end joining.

32. The method of claim 12, wherein the DNA of interest is integrated into the target site via a homologous recombination.

33. A plant, plant cell, or plant part comprising the recombinant sequence of claim 1.
